United States Patent Application Publication US 2026/0191916 A1 - sequence listing, part 87

SEQ ID NO: 584 - DNA, 5283006 bp, Bacteroides ovatus (residues 3,522,005-5,283,006 of 5,283,006)
  source 1..5283006: mol_type = genomic DNA
tcatgatgctctttgacctgatggcttttttctgaagatgttgtaaaagtctagtcctcattgcattaaatttttccatttgttattatttaggttgaagtcttttttctgccgtcttttggcaagagtaacaaaggaaacaaacgaaattcaaaaaagattttggaaaaaagagggaatggttgattttaacactaaaagagaggtgactgttgaaaaaagtcaggcacgaaccggtgttgttcgtgcctgaataatgggatgaggattacccgtcgggggaggtatatcctatatatacgctgttcgttttatgatttcctgttttaaaacatctgttccgcagtggtcatacattgaatgacatcttctttgctgccattgaaaggacctgatttctctatttttaaagttgacatggctgctgcaaaacgtcctgcttcttcgatgccggcacccgatacccgttggtatagatacccgatggtgtaagtgtctccacaccctgttgcatctaccacttctttgggtttatatgccggaatacgatagaagtcttttccgtcgaaaataagtgatcccatgcttcccaaggtgacaagcacttctttcacgccccattcatataattgacgggcagcttcatgcggatcggaaagacttgtcagcacttccatctcgtgctcgttgactttcagaaaatggatatattgcagagcctcccgcttatctatccaatccaccggatagacgtgggtgtcacgtacttcacgtaaatagccttgtgagtctactgcaatcaaccctttttgagatagttctttgattacttccaacgagaagtcgtctgccagcagagagccgagatggtagatttgcgcatctatatctttcagctgaccggcagtgaacggatcggctttcgctaatacacgttgagtacggtcgtccggattggcgccatagatattctcgaagtatacggaatatttgcttggcagggcggttacatgaatacccatttcacgtagttgctccacgacgttcatttcagtgacaccaactgctgttactaaagcgtaatcgatgtcgttaaaatggcggatggcatgtgaacaataaaaagccgttcctcccggcatatagacagtgttttggggagtgactactttgtctaatgtgatgtgaccgatgcagcaaagttgatgtttattcatgtctaaccaattaaaaagcctccaagatagtatcttgaaggcttctagtttatttttagtgcggctgataggactcgaacctacacgtctcacgacaccagatcctaagtctggcgcggctaccaattacgccacagccgcatgtgtagcttttttgtttagcggtgcaaagataggaagattttctgatttggcaaataatttggcaataaagttattcacttaagatttcgaatgccttttcaatcagtggatctttcttttgtgattctatgtcaccctgctctatcccttcttccagaatcttatccatgtttacgtatacatcaggttttattccatcttccaatgactttccatacttatcaaagtgggggctggcagagaagcggacgctccagccattgggtaattctgatgaaaatggcagccctgatccaccaccggtctgatcgcccagctggatgattcttttatcttcgttatcattgtttaagctgcgcattacgttaacaaaatcatttgtggcactataacatcgacgattggttagtatcacgacctttttttgccaacgaatactgttggagggttctaaataaatgggttccatctctgagaaatcattgtgtcccggacctgtcttatgttggatatatcctgttaatgccagtttatcagtgaaccgggcagctatgcgtgaagaattggttagattacctcctccgttatcacggacatcgataattagtccattgcagatttgtaaatagtaaaggacctcatccaaattgccatctccaactccggcactgaaactttcataacgtatgtatcctatgttattgtcaaatattttatatttaagaccagcagatgtgcgatagcctgaattggcactacccagataatagttataaagaatatcttctctataattccaagggtagccctgataccatgcatcgtaataagaaatacgactggcagaagatagattgacatgcccgtctttcaagatataaagcatttggcttaggatgtcgaacaggtcatcattggacatcgacggaataatcagtttgctatattcgtcatgaacagcatcccagtcaatgcctttcgtatccaggaaacaatactgttcgtcaatgatcttccatagttgttcgaaattacctctgggatcattggcgtagtcatcttccccaatgcaaccagtcagcaccggaaggcagcagagcagccaaagtatttgtctaatcttatttctcatcattaattgatctctcacttgaagtttcaacattaaattttgttctcttagtaagctctaaccgatgagggaagagcggttcctttcttatttcggatacggtataggtctttcacaaatcctaccatgaatacgtgtgagtaggtatgtgtcttgatattgttaacgttggattgctgcaaatcagccaggtagctgaagcgcattttggtatatcctatcggcaggtcgacggagagcatctgtcgcaacgaaggttgattgtgcagggaggtaaattttattactccactcgaatttcccaaagagaatatttcgtaataagattgtccgtagtggggagagaacatcactcccataaccggcagattgacctgataacgaagcaccatcggataccgtttgattttcaggtgccaaatagccattccggaggcatccagattgacgtatgcccgtgcggatgccggattgttggtgttccggagattatagacaaagcctccgttgacatctatcaatcctccggctaataatttgaaattatctgtcaggcggaactggtaatgtaatccatagttccagttgactaatccggagaaagtgttattgttatcggcccggttgtgcgtatagctgatgtttgcctgaaagaagttctgcacagatacatttccatcaaacaacttggtcatccgaatcaattcacgggaaacacggaagtcgattcctttgtattcctgcggtgaaagataggtgtcgaaaacgttagtaaatccgacaccatacatggtggcacgtgttacataccgatgggcttgcagactgtcgatctgcgcttgtaatcttgtgcaaagggcgaacaggatgcaacctgtcagccccaggtatattagttttttcttcatcagaataatttcatctgcccggtgatttcatcaataatatcgccttcgctcttgccgctgtccggatccagattttccggctcctcttcaggaacttcctgttgttcttgtgagggttcggggaagcgagttggttcaagctcattgattgtctccactgcataggtagtaatacgttttcccttggctttgaaacctttgacagcaatgaattcatccgcatcgatattcaacggatcacggaaattgtcgtgtccgccaaatatgacttccagacgaggatagtactcgtcggtcagcagaatcagacggttgttcttattttctcccaagtagttctgtttacggttggaggcctcaaaacagaaacgtttcagatacggataattctgttggtcggcatcgtaaagcgcggcagtccatatcttgttaggatcaaacttctccacgatgcttacattatcttcatagtggttgctcaagtcgaagttggtagtatagaaatcaccgttgttcagaacaatcaatatgctgtcgtcgctttggaattcacccagatattcacctcgtccgtcatagttgaggcggagtatgtcacggtcaaaccatactttacgtccaccgagcgtagaacctcctttttgtttcagggatatcttatgtaccggcaagcgggtaagaatcacgcctcgtgcctgacgtcccttgatgctgacctcactgaagtcatgctcgaaaatgatacgacgtacacgcggattcggtttcagtgtcaccttgatgatttcggcttctccattcggattggcgctgaaataggtaatccgtgattcgggagttccctgtgtgacatcatattcgcggtcgcgaactacagaggtcacggcgaaacgttttacgtatgtcgttccttcttttccgtcgcggtaggctacattgtagatcgtacgtttatcgttcttcttgaatacattgacataaagaacgtttttgccgacgaatttcttgtcggcaacaggagtaacgatatacttaccgtcgcggaagaagataatgacatcatcgatatccgaacaacatgctacgaactcgtcttttttcaaggctgttccgataaatccttcttcgcggttgatataaagtttttcgtttgcttctactactttggcagcttcgatggtgtcgaagttacgcagttccgtacggcgcgggaagttcttgccgtatttgtttttcaacatctgataccagttgacggtataatctacgatgtgagccagatgattatcaatctcggccacttcttctttcatcttggcaatcagttcatccgctttgtccgagttgaatttcagaatacgccccattttgatttccatcagtttgagaatatcctctttggttacttcgcggataaatttcggataataaggcgtcaggcgttcgtcaatatgagcacaagcagcgtccatatctttggattgttcgaactctttgtccttatagatgcgttcttcgataaatatcttttcgagcgaagcaaagtgcaacgcttccagtatttcgtttttcttgatttccagctcctgctttagcaaatccagcgtgttgtctgccgactttctcaagactttgctgacagtgaggaaatgaggtttgctgtcatcaatcacgcagcagttgggtgagatacttacttcgcaatcggtgaatgcgtacaatgcatcgattgttttgtccgatgatgtacctggtgccagatgcactaatatttctacgttggcagctgtgttgtcatctaccttgcgaattttgatttttcctttatcaacagcttttaggatagagtcgatcactgttgaagtggttttcccataagggatctctgtgattgcaagtgttttgttatcaatcttgttgatcttggcacgtactttcactgctccgccacgttctccgtcgttgtatttggctacgtcaatcgagccgcctgtctggaaatcgggatatagttggaattcctctccacgcaggtaactgatggaagcatcacaaagttcgttgaagttatgcggcaatatcttggaagaaagtccaacggcgataccttccactccctgcgccagtaataacgggaatttcacaggaagagtgactggttccttatttcgtccgtcgtatgacaatttccattcggtagttttgggattgaagacaacatccagcgcaaacttggataaacgcgcctcgatataacggggagcagccgcaccgtctccggtgaggatattaccccagttaccctgacagtcaatcaacaggtctttctgtcccaactgtaccaaggcatccccgatagaagcatccccatgcgggtggaactgcatggtgtgtcccacaatatttgccactttgttataccgcccgtcatccagacgtttcatagaatgcaggatacgacgttgcacaggctttaaaccgtcattgatgtggggtacggcacgttccagaataacatatgaagcatagtccagaaaccaattctggtacatgcctgttaactgatgttttacgctttcgtcccgcgcgtccgccggtttgtagtctgaatgttcttccgttatctcgttgatttcgtcactcataaaattcgtatatactataattttaacgcatacgcacgcaaaaatacaaaaataaaagagatttcgatgaaaaacggtgaatattccgtgtgttaaaagggtataaatcagctttacggaaggaaaacagaaaggcatatcctatcaaagacatgcctttctgtaaaattataacctaatgaaaaaacgagaaatgggtacatgatttaaacccgtatttcccaacctttttcgtactctcttctccaaagtttattggcttccaaatcgttaagaattcgtccgcttcccggatcaatctgtaatgaatgtccgacacgttgggcaatattacctaattgtaccaactgggtactgatacaggcatctacaattccggaatttaactttgttcctttgcgaatggcatcaaaccagtttcggaagtggaaggcatccagcttttcggatggattcaacagattgccggtctcaaattttaaatcactttttacctctttaatcgttttaccttttatatctgtaattttatattcattgccaccgccaatgaagagagttccggtttctccataaaatgcggttcctactccatatccgtctaccggcatcgtattacaactacgtccttcccatgaaaaagatgcttcgtcaccaaattggaaggtgataagttgtgtgtcaggagtttgccagtcgtcctgaaaacgataccgacctccgatagaatcaacctttgtaggataatctacgcccagtccccagcggagtatatcaacaaagtgggttccattgttgagcgcttcacctgttccccaattccagaaccaatgccagttataatggatgaaattatctttgaaatctgcaacacgtggggcaggaccttgccataaatcccaatccagataatcaggtacaggaacaactttccctgttccaatggaagggcgattattgacataccaagatttggcatatctcacttttccgatagaaccggattttatttcctccatagctttaattacattgggaaatgagcggcgttggttacccacttgaacaatccggttatatttcaaagcggctcgaatcagcatttcattttctgccggattatgactggtaggtttttccagataaacatgctttccggcctgcatagccataatggctgctttggcatgccaatggtcaggggtagcaatcaccactgcttcaaaatcgttcgactctaacatcttacgaatgtctttttctcctttgggagtacgtccggtaattttgtggatagcagcctgacatttttctaatgctcttgagtctacatcacaaatgtaagtaacttcacaatctggaagtttggcaaatccttgcgccagggccttacctctcgagttcactccaatgactccgatacgtattttttcgttagctcccagaatatcttgataacggcttgaaccgaatcctggaagtatgcttcctaatgagagtgcagctgtacctgctactgtttttttgataaaatctcttcttgttgtcatagtatctatttttctccaaaattaggttgttattagaatatgtgaatgagtatttccgtcaattctccttcaaaaaacgtaaatctcttatttttttcttcggaaaaggtgactcaagaatatcaggattcctcggggaatccataatatgagatagatgaaaaaactaatcacgatgacatacccgatttgggatattatttcaatccatgggcgggaatagataatgattgcaattacattgatgataaatgcaagcaggaaacttagaagaaagatattcctttcttgtttcaacttttttgaggtgataataatatctttcatagtttagaatttcatatagggtattttatattcgtcggggaagaggatatggcgttgttcatccattgcctgatttccaagtaaacaaagaaccgttgaacaatatgcttcttccactacattctgtgctttctctccggtgatacacgactggcagaaagaagacaggataatgtccgaaccgtctttgtctgctccgatcatactcaatccactgtttacgtgaatatctccatcaatgataaagtgtggtgtgtactccatttttgtttccggtcgccaactgggacctgctgtcgggatggcggcaaaaaccttgtcttttacctggtcaatcagctgtcggatgcccgaagtagaatggtcttcttccaggtaataaataccttttgccatttccatggttcctttacttcccagaatctggtcttccattccgttgaatttattggaaatcaatgattcgtatgcgatcttaactccatccgagtatctgtaagtgacattgacgctatcataaacttcccgtccgtctttccagtatacaatgtcacccattcccataatggattccggcattttttgggctgcccagttacaaacttccaactgatggcatgctaattccgtcattaatcctccggagctctctttgtataatctccaattaatcttgcgttccagctctggtgaaggaatcggacgacgccagtctgcattacggaaccagtgacagcgaagacctaccacatctccgatgagaccggaatggatcatctgcattcccttgatgtacttctcgtcatacattcgctgcatacaaaagtagaggactttgtctgactggttgtaagtgtcatagatagccttgcactcgtcaagggtacgtgccattgctttctcgcaaaagacatgtttgccggcagctaatgcatccaatacaataggtgcatgccagtttaatggtgtggatatgatgactccatcgatgtctttcgattccagtagtttgcggtaatccgtatatgacttagcatccggacaaagttccaatgcttgttgaagattgggggcataattatcacatacggcaacaatttgtgcatgaggtatttctttgaggttatggatgtggtattgtcctctggacccggtaccaatcaaagcgattcgtgctttctcatgcttgatctcttgtagtttctccggagtacaggaagtcagccaaggagtggtcgccaataatgcggttcctccggcaacatatcccaggcttttgatgaattgtctgagtcctaagtctactcctttttctttatgttctttcatatcataaattgtatagggttgcttgtatattattgaacttttctgaaatctttttttgttcctgttcattggcaatcatccagaccgtactaagaacttcggcttccaacgggtcgggggacaggatagaacttgcttttcgttgttcattaaatatgcctgtaagcggattcataatgtgtccggtatattgtaacgtattgccggaagtggataatgctgtatcctgcagatcgaattcttttagaagagactgattgtacgggttcagaaaactgactttccaacaatctccataaggatgatgtcctatacccaggatcgaactgtttccaaaattagcaaatgcatcactaatattctcctgttcaatgaatcttcttattttcttcaaagcatatcctttggcaaaacctccaaaatcaagtgaaatatcaggagatgtaaaggagatacatgaatgttcatgaagttgtattctggagaagtcttttaatgtaatgtcgaataagtgcgaagtgctctcgtaatagtatgagcaaagctgtaagattgattccatctctttgctgatttgaatcttgctttgagaagtatgactattaatcttggaaacttcactatgaggatcaaaacgatttaatattttatccaatcgctccagctcataggtgatatctgcccaaagtgtattcaatcggtcgatatcggaatgaatgagcaggatatcgaatcgggtccccatgatatgaggaatgaagccatgaaacatggcttcatttttataatatttgcatcttgtttctaacacctattgttttgtttatttatttcctatctttgccatttctacagcagtagtagtaatgtaatatttagctagtgtattttcattttcccattccggcatatccttattgtctacataatgtaggaaagcctttgccactttgctgaaatgttcttcgtgtcctaaccgtttttcctgtggtatgtcaatcagataagttccattctttttgtttttgacagataagaacggataagttatttgaagctgttccactgttttttgtaattgagcttcaaatgtccgattgtcaatgtccggttctttctgtatatatagctcttttacaaatccatttttttcatcctgaacgatttttaaagtggctttacttcctttctttatggaagtaaatgtatctcctccgttagtgggtggagtataattccatgtgactttcattcctatacaaatccctttaacggtatagttgaggcttccgtttgccatcacttccaatacatcgttttttatgtatcgattaagataagtgggaaaagaatcgatttgtgtcgattgactgaactctgttaatgtaattggagttggccagtgtttggcggtattcacagtgacatctgattgataatgaatcgtttcatcaggaaaacattgccagttgatgaggtcgatcagatgtgttgtaacatctgcaatgccttctccttgttgctctacatcataataccatgccgggcgagttaatggtttgccagaaacagtcttgaaaaaatgatgtacgctttccattatgacagatggattgtccggtgaacctttttgtaaatctccgaataattccgtctgatgcaaaagctctttttctatgatattgagaatatcatatcgttccgtcatcagatcgtataaaagaagattcttttctttggcgagttgataggcttctgtcaataacttgaaatcctgtggattgatagccagtggcttatcggcaaggacatgatatccggctttgatagactccatgatatagcgcgtctttttttgattgtttccagccaatactactacattacctttatgatcggcaagcattttctggagataatcatctccggtatatacttgttttttccatgtcgtaggagattccgcccgctggttataggaatcaatgctttcctgatattgattgacgcctgttccttcgggggcatatatccggatggtgtcactgacatctgtcaatgtctctttttgaagcaggctggcatggaaatgtccgggatcgagtactactatttccaattggggtagatcatttgtctccatcctattcgcagcttgctttttcgagaaagaacaagaaacgactataaataaaattgctataatggcagtccctttatatatagatttcattctcttactttttataggttttgattagttttcgtgcatctttcaaacctttttgataagcttcttccaatgtgacaattcttccattctctgctttactcatattggatgctttcataaaagtgaatatttcgattgtctcttctttggatataggtgaaattcctgtttgaaagtatttaagaatctgctcaagaagcgctttataaccttggtaacctcctgcggctactgctccttttgaagtataggcagttccaccataaatttgcggtccttttataatcgctctgaaagttccgattctaccatctttccatcgtcctactactacatcccctctatctgaagacatccggttgactgattcgcatcctgtccccataattgtgtataatgtttctactccatgaataccatagaaaccgaaatccggatgcgttggttccactttgtgaggagaataacaatcggctccaaggattttgccaaattctccatttcttaatttctggttttgaggagtaaatctaagagcagaagaggagaaaacaggtgcattgtatttttctgccatttcataaatagcgattgcatctcctaaagtagctccgataggtttgtcaatatagcatatcttacctgatttgaatacctcgacggcttgttccaaatgtagtctgccatcattggtttccaaaaggacacagtctactttttccagtaaatctgctattgatgaggtgatttccacgccatttgctttgaccttttcaatgtatccggggattcgttcgtaactggattgaatagtctttgaaccgtacggatacgctgctactaccctaaaacctttggaaaaggtctcatccgaaccactattaatcaattcggtgaaagcggtggaatgggatgtgtccagaccaataattccgatccgcataactttttgtgcgtgtatactgaagctgatagccagtagtataagaagaagtgagattctgtttttcataatcctttataaattaattctttctgcactttccggatccaaatataacgaagaattttcttttcttcgcaatatgctggccggacatttttctgaaacttcaccataaacagtctgatagactgcttgagctttatttttgaacgggacgatgcaaaacatccattcagcttttagcaaagccggtatcgtgagtgttaaagcttctttgggtactaagtctagtgtcatgaagcatttttcattgacttgctgttggcgacatattggatccagctcaactactttcacaagtttgggatcattaaagtctgctacatccggatcattgaaagcaatatgcccattttctccaattcccagacaaacgatgtcaaccgggtgcttagtcagcaagtctgcatatcgctgacattcctcttcaaggttttccgccaggccattcagatagttgactttcttgaaaggaactttgtcaaagatacgaattctaaggaaatgtccaaaactttgtggggcttccggatgtataccgatgtattcatccatatgaaaagcgtttattctggtccagtcgatgcgtttgtcatgaatcagatgactcaaaaactcattttgtgagggggcagcggcgaaaatcatatttatttccggtttgctttccaataagcgacaaatttggtcgccgacttcttttgcggctgcactgcccatctcttgaatggacgggaaaattcgaactgttaattgttcctgctgaaaaactttggtcttcgtttcatttagtatagataacatggccttttaatattgtattatttatatttatttgattatcaaaaatgactatgtcggcatccttaccgatttctaaagaacctttttctttgtcaatatgaagaatacgggcgggcgtcaggctcatcatacggacggcgtcaatgagaggaacaccggctaaatatatcatggttcgaaccagtcggtcggttgttgcaacactaccggcaaaagctttccgatccggcattttggccactccgtcttcgataatgactttctgaccgttgttgaggctacctaatatcgattcaccgtccggcatacccgctcctctcatggcatcagtgcagagggctgttttatcaactcctttgaacttgtatacgaattggagcaggggtttcggaagatgtatgccatcggcaataatctccactgtcatatcttcaatcaagtaggtggcttctactactccggcatagcggaaagcatttttgcgggtcactgatgacatggccgaataaaggtgggtcacatgtgtataacctgctgtaaaggctttctcaacttcttcataaatcgcgtcggtatgagcgatggaggggagaatatgatgttgttgcagagtttgccctagtgctagagcaccctccaactcaggagctacgctccaacggataatatcttttgaggcttccagaatggcattatattcttctgcttgaggctttttcaggaagttcgggtcttgcgcaccacattgtttcggtgaaaagtaaggtccttccaaatgtaaaccgataaactgcgaaccattgatattcatttctttggctttccgatatacggtaaacgtcgtcattaactcctcaatagtgctggtgagtgtggtgggaaccattgcggtagtaccatacttggcatgtgtctcggccactccgagaaaagcctcaacagtaccatccatgaagtcatgtcctcctcctccgtggatatgcatgtcgatgaatcctggtgaaacataattctgacgggcgtctattaccttgtcaccgacgagcggttgatagcttccattgggaataatctgctcaatttttccattttcgcatatcaatgtttggcccatttctatgcctgttggcaggatgagttttccatttgttatgatgagtctttccatattatttcgtttttaatttatttccaggagtctattttatgacctttaactgcaaagaaaaccaaatataaaaaacagggaatcaatacccaataaccgaaacgcagactatacatatctgccagatgaccatatatcagaggcagaatggcattgccacataatcccatgataagaagagaggaaccggttttggtgaatttccctagtccatgaatggaaagtggccagatacctgcgtagattaaagcattcgggaaacccaatgcgttcagaaagaaaatggaggcattggcatgatgaccgaacagagttacttcaaaatctgcaaatacaactccgaatgaaaggagtaatccgatgatggtacaacctataagtgcatttttttgtgaaacatatttgggtattaacaggatccccagcagataaccaatcatagtacaggccaatgtatatgagggaaatgttttagcttcgagcaggtccatacccatcgaattggcataattaatgattgtatcaattgcgataacttgtgttcctacatgaagaaatatagccactgctcccaagataaggtaaggaaagtcgaaaatactttttctggtgtgatggtggctacctgtatcttccgtgctgttttcttcgtctgtgttgatttcaggcagaatggagtaacggataccgataccggtaaacagtaaaataacgcctagaacagcataaggcacaatgacgcgttgtattaattcgtcaagcatagcgttctttgtgactatgtctaaagtccccgattctatagtggcaaaaagctccttgtcggtaacatttaatatcaatgcagcaaatatgagtggtgagacgatacctgcgaatttattgcatattcccataatactgattcgtctggcggcactatcaataggaccgataatagtgacataaggattagcagcagtttgcaatatggctaatccggtaccgatggaaaacagaccggccaggaatatctcgaactgacgggctaatgctgccggaacaaataagaaagctcctaaggcggtaagcataaaaccatacataatacctcgcttgaatcccactttcttgagaagtactcccgaggggatagccattacaaagtaggcgatataaaatgcaaaggcgacaaaataggattcgaaatgtgtcagttcacaggatatgcggaagtatggaatcagtatggcattgacccacgacacaaatccgaagataaagaacatccctgccagaattgcaattgatatgtagtatgtctttttgctgcttataaggttattgtttcccatgtgtttttattttttcagttcgaaatctttctgtaatttgatgtcccgtgacgatgcgcctattaatacagtaaacatacccggttcgtctttccagcgtttgctttcggtatcgtagtattgtaaggcgcggcgcggtaacttgatagtgacttgtttggattcacccggttttaagccaaccttagtgaacccttttaattctttaaacgggcgttctacagaacatttgttttgatgcaaatataactgtgcaatttcctggccatatcgttttcctgtgttagtaacggtgaatgatacggcaaactctgtgtctgagtctttccatacaggtttcatctttatgtttgaataagtaaaagtggtataggataatccataaccgaattcaaatagggggactacacggtaagtatcgaagtagcggtagccgaccataagcccttccttgaaacggacggtgtcgtttatacccggatattctccaaatacgtgatcaggcatatcttccagacgcttacaccaggtagtagtcagttttcccgaaggattgacttctccaaacaatgtacgtgctagtgcatttcctccttccatccctagaaaactgccgtgcagtaatgccgtagcatcattataccattctcctatctcgacggggccaccggagattagtaccactacagtgttgggattaacctccaggataccttttaataatctgtcctgttggtagggaagctttaaattcggcttgtcatacccttcacagtcagaaccatgttcgtgggaggttccacctatatagattaccaattctgcttgggcagctgtattgattgctttcttatatagctcttcatcggatttatcaaattcgttcgtgaaccaatagccaaccttatacgcctttttactcaattgataaccgggtgcatattcgatccgggcctttccatctaaaagattttgtagcccttccaaaggagtaacttcatatttagctttaagttttgtactgccacctcctgctgcaaatacttcggtcgcatttgcgccaatcactgcgacattcttgtattgtgcagggtctagtggtagcatatctttggaattcttcaataataccaatgattcctccgctatttctctggcagccttagtatgggcaggtattgcaagtttggctgccatgcctgtggtgtcataaggagcttgtcctattaaatcaagtcgaatcatcaatttcagaatattacgtacttttttgttgacagcttcttccggaatctctccattacgtactttcttcaataaaggatcggctaaataatatttattgaaagcatatttcccattttctttgatgcttgttcccatttcgacatccataccacacagagctgttcgctctgtgttatggactgcattccagtctgatacgactaatccgtcaaatcctagttcatcacgaagtaaagtatcaagaagataaggactttccgtacaccacaaccctcgaaccttgttatatgccgccatggctgccatggctccacctcgttgtatggcagcttcaaaagccggaagataaatttcgtgtaaggtgcgttcgtctacttctacactcactttgtactggttgtatgcctggctattcagagcaaaatgcttcacacaagaggctactccctgtgactgtactccttgtatatatggaacagccagttcaccggagaagaaaggatcctcgctgaaatattcccaattacgtccattgagtaaggaacggtgaatgttgactcccggagccaggctcacatgcttaccgcgtgctttacattcagctccaagaacttctccatatagctgtgccagatcacggttccaagtagatgctaaggcgcttaatgcaggtagatagctacatgcgtcgttatcccatcgggcggattcccacccattggctactccctcaaatcttactccgtgaggtccgtcggagtagtgcaggtcggggatgccaagccttggaacaccggtacttgaaaacatcgtgttactgtgcaacattccaattttctcttccaaagtcatttgtgataataaactttctatctgtttatcagtacttgctactttattaccagtcagacaggaggagaatataatcagaatcagccagctatatggagtcagtcttttcatactagaatacttgttgtctttgattattttgaattattctttcttgtttcaatttcactgtacacagcatccggaatcagatcaagccagtacggatcctggacgagttccttgtacagttcaagtgccagagggtcactttgcagacggcggtcaccattctctgcattttcgtgattctcccatacgacggccttaacacgtggctcttcatccttcagcttaaaccattctcttacccatctctggtggtcgcatgtactggagtatcctccttcactaatcatgataggcttgtctgccgatacctgcttgattccttgcatcagcgtgagcggatatcttctttcttccggataagtagcactaagcgatggtggataacagcttactcccagccaatctacatacatatctcctggataatagtttttcattgcgtttgcttccgtacctggcatgcttacactgttgggtgaccatacgaagacattgtaggcagtgacacccaactgttctgcaatgttatacatacgtctccaagccttgacatagtttgtgggatctccgtaatacggagtccagcttccattcatttcgttggctggtctgaaccagataggtcccatgtcacgtactttttgggcagccacttcggcgaagtatgatttgtgaaaatcgtcgagttcgccatttgccatttgttgggtgggaatgacgggcagccatccgtaaaggaagaatcggtatttgccctgatagtcttttccccagtatttctcacgtactgtttgcatttcgctgaaatttcgtcccggttccatattttgataccataagatcatagatagttgctttcccaccaatttctcaaataaggcaacggcacactggtcagtacttccttcgcggtcttccggatcgaatccgtataatggtgggaatgctccatgataacaccctttttcggggacgtacttcatgtcattatgaaattctcccattaccttgatttcgtcgatgagcatcatcgtactggtggaagctgaagatttgagagtcgctttcacatatctgcatgctacattactaaagtctgtttttccccaagcgtccgactttccgttgctgtcggaataggtaattggtgaggctgctttttcccattggcttttgtccttgctggttgatacttctatttgagcagggaacacaatttgtgatgtcggatcggaaatagcatgtactgatacttctgtgatattgcgtaatgatcccaaatcaattattacttctacagtttgtgcatcccaaccgactcctctgtttttagtcgagagggtaccggtctcctcatccgtcagtttggtgccggatgtccagggatcgagaggggctttatcagcataggcactgttggctacaacattcattttatagaatttgcctgccgccacattaataatgctttgttcatttggatctttgggcttgtttggatcaaaagtaacttcccacgatctcgtttcttctgcattgcaagcgtatatgagtattgcaactgctattaaccataaattttttaatttcatatttagtggtatattataaggttgattactggttgtttgtattacatatcaatacagtcatattggtagcaggcgatgcctccattagagaatacgagataaacgtatagataataaccattttgggcaactttaaatacgacatctccggttccttcggtgttttgaccggaattctcgagacctccatatatcttgtccggacatactactatttggttgtcgaacgagccgctactaagatcatacatacggacagcatcagaaccagttacggcatagttgaaactatttacatgattgtaaatgacataaggtactttgttgaacacagcatagtctacagcattgataattgtgttacccggagcacccgtatttgccgcttttatgctgttgtctgttcctttaaaccagtagaaatagcgtttggcagaagtatctgtgacatggctggccaagaaatagtcactttgagtatcggtgtcatcagcataaatcacatccgcccatttaatccagtttgaagtcagtagagaggaactcataatgacaaattctggactttgtgattgtaaagtaccatttatgacacgccagcgggcgaattgcactttactatctttttggaataccggagttgtgataagggcattggcatccaaatctccttggatggagatcttccagccgaatcgtacgttagtgccagttttatattcaatatatttctgtggtttctcattcactccattagctttccatacagtgaaagtacctcctgatggagtatagctgcagaataaaatattatttccccggtctgctgttgcatggaagtttgaattatcaccggcaaattgactgatatccatagaacctgctatttctccggtttggctattcaagtaaatggcacgatcattggcacgctcgttgatgacaacatatttgtcgactactgcaagtccggtcactttacccggtagcagaataccgcttatttcagatagtcttttagaccatagtagcttaccgcttccttggcgaatacctgcaacagttttttgcggaatatctttttttaccgtatatgttgctttatctataccattctgtgctgtgacgactatggtctgttcttgttcatagtctagtgcttctgtttcgggattgggactgcaagttgctccatgtgagatatcaatgttagctatctgctcccctacattatctatggttactaatgaaattgttttttcgttttcattaatgactcccaatagccctatggcaggaatatcgaatttggtgatgctacattcgttgctcttacggatttcacctattactttgaattcggtactagtcccggaggtctgatctttcactgtgatatagttgtcttgggtaagatccatataaagtaatggtggagttacgctgacattattcgctaagctggcactcaatcttacccgttttagtgcagaggtcggcaatacattatccgacaatttgggataattgtatgggaaaataaatgtgattgaatgattggtataatctatctcacctttgaaactgttttcgctgctgtcatcgttcggaaacgatgcagtgatgctgttgataccttcgcgttgaatgtcagaacccaactcttcaggactgtgacaactagttactccccatagaagaactaatgcctggatgattgatataattttgtttttcattgttctaagagttttattgttatttccattcatcatattgctcaatcaatgagttattcttcaattcttcagacggtacaggaaggacatataatttctttataaacttgcggtcctgtccgtcgcaatcaacatattcgtatgtattggttgcaccaatgattttaaagccatgtgtgcgatagttgttgtattcaatatgggctaattcccaacgacgcatatcccagaataaatgaccttcataggctagttcaacctttctttcatttctgtaatctttgaaccaagcctcgcctgtagaggatttacccggtaaattcacttttactctggcgcgtacctcattcatggcactttgggcttccccgatcttattgagtcgataagctgcttccgctttgttcaataaaacttcggcatagcgaatttcaacccacggttgggcacttttcccatttttgacgtctgtcagcgtttcgtctaacaatttccttaaaaaataaccggttgtggttttgccgtatgaagtaccctgttcccggtaaggcataaacacaccattctttccgtcaaggctgcaatccatctttttccctttccaggtacatcctctatagattacagttgcggcgaagcgaggttccagttggtcgtatggaggagtctcatcagtaatgccatgccagggtgtccagtctatcttttctccatttttgctttcataacattctaccatttcctgggtaggagttcctgttgaaccattgtcataaccatcacattgtggtacataataccggtcgaaaagatgattaggcccgttggcagcatcataatcaaactccagaatcgcttctttattattccctttccatgcatcttcatatttgtccgtcagaccatatagtttgagtgcaattacattattagcagcatcataggcatcctgccaacgtttggcatataacattgctctcgatttcagtgcataggctgctcctttggtgatacgccctttatttgccgcatcccactccttgggtaaattattggctgcaaaatcaagatcatcggctatgaattgccaggtttcttcagcactgctgcgggctttattagttgataccggcagatcgtcatacaagatgacacctccatgtcttttggctaactggaaatatacaaatgcacggaaaaagcgtacttgagcttcccaaagcttatttctgtctgctgaaaattcggaatattttctttgtagagatagaaattggtttgtttctcggatctgtttgtatgctgttgaacgtagccagatactgtatagacagttatccggagagatagcatccggtgtaagtacataaagattaggatgcccggctctgtgtcccagcgtatatgaaccatacttaaatgcgtcagtcagactttctgtaaaacttccgtagaattgggcctccccgaattgaccgtaatcatgcaggaggggatagaaactattcacatatttgtcaacctgggtttcatcttgccagatgatttcatcactaacggtagtcgtttgttttacttcatccagccagtcgttgcacgaacttaaagtcagcaacacaaagaagagtgatatattaatagataactttttcatatagcgtatattttagaatgtgattttagctccaagtgtataagtcctttgttgcggataatatccattgtttacagctggagattccgggtcgatgttgtacttggacacagcgctgaaagtcagaaggttgtatccctcaatatagaggcgaagagcttccactcccaatggactcaaccattttttagggaaattgtatcctatttgcgctgtttttattctcaaatagtttccgttacgataccagaatgtggaggccagcccgttattcaaacttctcggattgatttccagacaagggaactctgcatttgtattttcgggtgtccaagagtttgccaccagatagactggtgcattgccattctgatagaaaggacgcgtgaaggccgtagcgctttggattccggatgaaccggttgccgtatatactccggttaatgcaacatcgctgccaagcccccatgatgccaaaatatcaaaatcgaatcctttccagttaccaaataaattgaaagaacctgtgtgggtcggtcttgaacttttacctacatacccctgatcttgattgacggttataataccgtctccatttctatccatatacttgatatatccgggataagccggtcggtcgggcatggtagcggagttggctatctcttcttcactctggaacaatccctgggcaatgaatcccattttcgaaccgatttgctttccggtcagtcgtctgtattccggtgtgttttcagagtcacctgcatatttgagccaccttccgtatgcgtatgaccagattaatttggctccatagctgaaacttccgattctgttctgatgtgtaaaggtgacgtcaaaacccttataatctgctttattaacgtttgcagttgaaaaataatagcctcccatggaaggagtgtgcgaaccggttacggaagataatttgtcatattcatatttataaaaagcatccagttccattcctaataatccattccataaagttacatctactccgatattatagttgaggcattgcgcccatgtcaaattgggatttcccaatacggacggatagatagctgtttgactggctccgcctattactacagaattgggggatgtgctcatcgtatttctccattggaaaggctggataccgctggttgcagtttttccaatacctgctcttaatttcagattgtctacccaagtagcatgaaaccatttttcattattgattctccaggcaagagagagaccgggcagggtgacccaacgtttgttcataccaccaaacagataactaccatcgtggcgtagtgaagcctccaaataatatttgtcagcgtaattgtagttcaaacgacctacaaaaccggctacacgtgtctggctgctgctacccgaaggtatagcaggttgctctttcccctctttggtgaatcctgtgatttggttcaactcatccaactgaatgaaatctaatccggttcccgttacaccgagattgttgctattacgttcccgtgtttcggccagtaataatactccgatcgagtgatctccaaatttgttatcatacgtgatactggtttgcgtagtgaactcttgggcgcgtgatgccgattcggataatataggtgtatctttcaaaacactgtagtccttatggtaggtgagtgtggtagtggctgcattaggtaaatccataatcatgatttcattcggcttggtcaactgtttagtcatcccatgaactaagtcgtacgctccctggaattttaaacttaatcctttaagccaaggtgtgtcgtatttcagactgaaattagactgcatatatgattggttggacctgttatatcctgaatcgtatatggatgcgataggagctaccggagaaccggaagtcggggttgaaacatcgtatattttcccattatattcataagtgtcctgtacatatggcaaagcgtagcatacctgttggggaatattcatccaatcatccggatcggcagaaaatttgggagcatcccgtttttctatacgtcccgaaacacctaatgacagactaagtcctttagccaactgtgcatcgatattagaacgaagattcattcgacggtatttgaacttatctatatttcctttttcctccagataaccgatagatgtgaagaaacgaatcttttcacttcctcctgatgctgaaatattatgatgttggcgaacaccggttccatatactttatcgtaccaattggtatttccccatccgtcgacaccctcgcgcattttgcgcaccatgtcgacagtaaacacttccgtatcaccttgtagaagacgggctttattgtaccaataagcatatcccggtccgtcgagccattcttgttcttctgcattctggctgatacccacagtacctgtatagctaatggtgactttatctgtttgtccctttttggttgtgacaatgaatgctccatttgcgtccagaccataaacggctacggctgatgcatcctttaatacagacacagattctatttcattcggatcgagtccgttgaagtcacttgcgcttcttctgatgccgtcaataacatagataataccactttgcccgcgtatggacaaggaggcattatccgcaccgggttgtccactggcttgtacggcggaaataccggcaacacgtgcaccgatgatattactgattcccatggttggggctttaaggatttctttatcggagacagtagatatggcggcggtcagactaccgcgcttttgagttccatagcctaccactacgatttcatccagcgaggaaacatcttctttaagagtgatattgatattcgtcttattacctactttgacttcctggctgaccattccgatataggagaataccaatacgtcattcttatgggcattaatgctatattttccgtcaacatttgtaatggtaccgacattcgttgcacctttgacagctacagatacgccaggtaatggttcatcattaccatctttcacaaacccttttattacttcttgtgcaagacaatcgagagtgcacattaaaagagtaataaacaacgaggttactaaccttggattccatctgattttcttcattgcatgataagtttttaaatatcctcaaatccgcaactacgcgcctaatatgatacagaagcgaaaagaatctgcatcgttagtaaaaagggggcacagtgcatcgaatgtcaccataaagacatataaatgccccttaccccaccatgcgacttgaggcaatacgcaaaatcacgactataagttgtcggtgttatccaaagtcattctggaacacattggcataagcattgttgcatgaatagatattcagcacatacttccttgatgtcctgacccatttggctggcacagagatgaacttaaagacaaacgtcttgatgcggcttgttgctttgagtccgaacctcttcacgtcaagcctcgccatgatgaatttatagaagttgcgtatgagtgccataagcagaagaaacaccgtgttttctcccataaaggattttggaagcctgttccagccgaatccgttattcatatcatcgaagatgcgttccttccctccacggaggttatagaattcgacaatctctttctcggaagactcgtagtcatttgtaaggatgcagcggtaggtgtattctccttcccacaggtcgagttcgccgtctatccgcttctgtctttgaatcacaagacggtatgccttccctttccatttctcgatgagaatggaggccagctcaaactcaatgccgcccaattccactttcttccaacctctgagggcaaagatgtcattgtagagcgaactgcatcggttagcacggatatagaaggtcttgcagtgtttagcaatctcttccactatctcttcagaacacgagccgcaatcagctctgaaacggttgataataagcttgttttgttcaaacctttcaaagaacctcttcagcgtgtccttctggtggaaacggacatttgtgttgccgtcgctgttctcaatgccgacaatcaagttgccaataaccgccacgccagggcgataaccaaggaacttcttgtatgtaggcttcgcatcaaacttctcagcctctatgaactggtggtcgaagtcaacgtcatacccctcgccctctttcagctgccctgtggacaataggcaattgaggagcagtgtattcagcttgtctgccgtgttgaagtcgtaggtcttgccagtgtcggatgtgtaggaaatgttatcctgggtcagttcctttatggctctaagaatcgtgtcggcactgcatgtgcgaagtgtcggatgaagcgaaaggtggtacatcagatgagtggtgacatcctcgatgcatgagccgccacaaaaataaacgctcataagcgaacggatgatttcgctgtattgataaccatacagcctgcatctcataccgagggttgagtcgattacagatgagagtctggagtcaaattgctccattattgaaaatattcctccaaaaggagtgagtttctcggatttaattgctacctttgccatgtctgtcgggtttgatacatattttgatttgcaacactaagataggtgaaaaatctgacatggcaaattcctgagcaactttttgttgctcaggtacttaaaaagttatatttgtaatagtgttgcggaattaaggaatattagatcgtcgatttgaaattttaatttctaacaatagtctctttagaccggttaactagttaatgatacaaaagtattctgtttcaaagacatgcgcggtggcaaaaacgaaaaactatcttcaaaaaacgaagaataatgcattgttaatcttcttttggcgtttttctttttaagaaccattcgaagaacttatatatagtttcgtttgattcgggagtaggatcatgtttgggcctgttcgtcattgccactcgatgatgataacccaaaagccggttgactgcgacagagtgatttaatggaatccatctgtctacattatcagaataacctcctgatacgagaaatgggcgaggagccaataaagaatggagttcatgtaaatcatgcccctctttacatagcctggcatagacacttgttgaagagttattgccgttgttgctccagatctttttccagggtgggggataataccccaagtaccaaggttcccaataattgatataattatctttggtttcatcaaagacgatacccggatcactccaggcggtgcaggcaaacttttcatataaacaagaagcaaacatagcccatttagcaccgtaagagtgtcccatgataccaattcgggtagagtcgacactttcgactctggctaatacttcccatgcattggctcccgcataagcaagtactgaaagaggttgcatagtggagttgttaatagtcgggtaatagagagagtaagtcttatctttggtggtctgtttagttcctattgagagagtaacgaatcctcttttggttaattggtaggcgaaatctctattagcttttcctccccatccgatagctgtttccggttcgtagaatactgtgataacggcaggatgtttcccttttttatttggttccagtaaatagccgtaagtctgttccagaggagtccaataaaaacgcactaaatgttgtttgaaatcttcgcgttctgtggtttttataatctccagcttttgattggtgatgatagccggccaatgaccgatcaggttcaaccatttgtcttttatttcttttcttcgttttagccagtcgtctgcgtttttgactgtatctccattgtaaaataaaagaggattgcggtaagttccaaatttctcctgatacagtggtggtggggtaaagtaggcggatagcttctcccagtttctttttgtctggttaatctctaatcttttgcaccccattattgaggtgatcccccaataaataataataggatagataatcgttctcgtttttcctcttatggtatgtctttgcatagtattaatatctaaaatgtatttcgaaaggtatgaaaacaaaggtaggtcattctcatgaatgatcttaatgtcaaaacgaaaaactgtcttcagaaagcgtttattttatctttgtctagtctttttctgccggtattcaataggtgaacatcctttgaattttttgaaaatccgggcaatgttattatagtctgtaaagcctacttccattgctaaatcggccaatggacggtcggttgtgagcagtagatctgcaagatgattacaccggcaattcagaatatattggtatatagaggtattcagtgcgtttttgaatttcacttcgaagtttctgcgggatagcggaatgtttgcaagcagagactctatggtcaaatcggaaccgtaatgagactctatatacttcactacttccagaatataagggtctttgatattgtgtttctccgtagattgccgtaattcgatgcggataggattgataacaatattgaaagtaccttcgtgttccttttttatttgttgatgaataagtctgccgatagaatatccgcctctttctacttcgagctctatggatgaaatgggagggtcggaaatattacacatcagttcgtcattgtccacgcctaataaagcaatttcttccggaataggaatattcgtcattttgcaagtttcagaaatgaatagggcgtgcgcatcatcacaacaaaatagagcgactggcttggggagttgctgcaaccattgacttacttccattcttatctcgtcttcctgtttatccgattcgaaactgaagaattcgcctccgatacgttttacttcctgccgatacccttcgcaacgttcgtcagaccaaaccacccctttaacgccgaaataagcaaaattgcgaaacattctcttggcaaaaaactgggctgccattcttcccgttcctttatagtcgcctgttaaattagagtaagtgacgctccggtgatggtagttttgtagtactaccggaatattcagctccttctgcaaatcgatcgtatcattattccactgaccgataatggcgtcggctttccattctttcgcccatcttaaaatgccttgttcgccatgcattgtgctataataagaaggcagtcggtaaaagagccagggtccgttttctttggagtattggacaagtccccgtagcagtttcctgtcaaattcgcttgaatagtctatcaatagaagaatcttaatcatagttctatgtttttctttagtataatgtagggatgcacaaatatagaagaattcctttgttttcctataataaagacttaattttgtagcaagaaaaacttgtatgacacccgggtctcgtgctgtacgacacccgggtgttgttgtgttcgacacccgggtctcagtatgcatgacacccgggtgtcgtacaaattatgataactaacttaaaaagaaaggagcgtaagattatgtctatcccttatgtagtgagaaagaaagcggatttatcatccggagaacggaaagagttatggtatggtgtacctagtaaaatgcagcgaagaggaggagtgaaaaataaagaacttgcagtacggatggcaaagacaacaggctttcatcgtgggcagatagaaggaatcctgtcggagttggttgaaagtattcaagacctgctttcctccggtcattcggtgaccattgagggattgggaacctttcaaacggcactgaccagtcagggatgtgtgctgcccgaacaggtaacgccggggaaagttgctatttcacgcgtatattttgtggcaaactcaaaattcagcagggaactgaagaagacaaagtgtacccgcataccttttaaatattatatgcccgaaagtatgctaacgaaaaatatgaagaaagcagaccgggaactggaacaaacagaatacgacatagaagagccggaaatcgacgaatagttgaataaaaagcaatattgtcttgttaattgaacagaattagattatatttgttcagtggttagaacaatatcttgaaatatgattagaagagaaatactaaaagaagttctattagataatagaaatgaggtggtcaaacatcaagttatacctcgtagctttcagtttgaagagtttggaaattatgtatttgtaggtatccggcgagcaggaaaatcatttttactttatcaacggatacaggaacttttgcatgatgggcatacttggaatgaaatgctatatgtgaactttgaagatgaacgtttgattggaatgacggcggcagatttaaatcttatactggaagtacatgccgagatgtcaacagacaggccgatgcttttcttggatgaaattcagaatattgatggttgggacaagtttgttcggcgattggctgataataaatatagggcttatgtgacaggaagcaatgctaaaatgcttagtcaggatgtagctaccactttggggggacgatacattacagtacatgtatacccttatgattttaaagagtttctttatgctaatggggttgaagttacagagaattctttgtttgcaacagagagccgggcagaaataaagcgtatattcaatgattattttcgttccggtggttttccggaaggggcatcgcttgccgcaaaacgggattatctgacaagtgtttaccaaaagatatatttaggagatattgctgcaagacattccatcgaaaatacttttgctttacgcatcctttttcgcaaattggccgaaagtataaagcaaccggtttcgtttactcgtataactaatattgtagcttcaaccggagtgaaaatatcgaagaatactgtcattaactacatggaatatgccaaagatgcttgcttgctgattcctatacaaaatattgcggataaattggtggagcgtgaaactaatccgaaatattattttgcggataatggcattctcaatttgcttcttttggatgctgatacctcgttgcttgagaatttggttgctgtgacactattgcggcgttatgggacggacgatgctgtattcttttataatagaaatgtagaggttgatttttatttgcctgatacaggagtggctatacaggtctgttataccatgaatctctctgatgagactttccaacgggaagttcaggcattagtaaaattgaataaggtatttgaatgtcggcagttattgataataacgtatgacgatgaagaacggattgagttggaaaaatgtgcgattgaggtaataccggtttggaagtggttgttgggtaaataagataaattaataccctccctgtcttatttatgagataaatccctatctttgtggcactttttacgaaaaaagcaaattcaaattaatagatatagaaaagaaaatggcacaagaagacgtttttaagaagcttgtatcgcattgcaaagagtatggtttcgtattcccttcgagcgatatctacgacggactaggcgctgtgtatgactacggtcagatgggcgttgaattgaaaaataacatcaagaaatactggtgggacagcatggtgctgttgcacgagaacattgtcggtatcgactctgccatctttatgcaccctactatctggaaggcttccggacacgtagacgcattcaatgaccctttgattgacaataaagactctaaaaaacgttatcgtgctgacgtgttgatcgaagatcagctggcaaagtatgacgataaaattaataaagaagtagcgaaagctgccaagagattcggcgaatcttttgatgaggctcaattccgttctactaacggacgtgtgttggagcatcaggcaaaacgcgacgctcttcacactcgttttgctaaagcattgaatgatggtgatttggaagaattgcgccagatcattattgatgaagaaatcgtatgcccgatctccggtactaagaactggacagaagttcgtcagttcaatctgatgttctctactgaaatgggttctacttccgaaggagcgatgaagatttaccttcgtccggaaactgcacagggtattttcgtaaactacctgaatgtacagaagacaggtcgtatgaaagttccttttggtattgcacagattggtaaggctttccgtaacgagattgttgcccgtcagttcatcttccgtatgcgtgagttcgaacagatggaaatgcaattctttgtaaaaccgggaactgaacttgactggttcaagaaatggaaagaaatccgcttgaaatggcataaggcgcttggcttcggtgatgcaagctatcgttatcacgatcatgataaactggctcactacgcaaacgctgctactgatattgaattcctgatgccgttcggattcaaagaggtggaaggtatccactctcgtactaacttcgacttgtctcaacacgagaagttctccggcaagagcattaaatactttgatccggaactgaacgagtcttatactccgtacgtaatcgaaacttctatcggtgttgaccgtatgttccttagcatcatgagcgcatcttattgcgaagaacaactggagaatggtgaaagccgtgtagttctgaaattgcctgctgctctggctccggtgaaactggcggttatgccgttggtaaagaaagacggtctgcctgaaaaagcccgtgaggttattgacagcctgaagttccacttccactgccaatatgacgaaaaagatagtatcggtaagcgttatcgccgtcaggatgctattggtactccgtactgtgtaacagtcgatcatcagacattagaagataactgcgtgacattgcgtaatcgcgataccatgcaacaagagcgtgtagctatctctgaactgaataacattattgcagacagagtaagcatcacttctctattgaaaactttacaataaacctttgacgaatgagtaaaaagatctatttattctccttagtattgctggctcttgcgttcactgcttgcagtgaaacggaagagacgagtcgttatgataattggcaggcacgtagtgtggcttttatagactcgatcgctagtgtgtatgatagtcctaaaaatcaagctttggatgatgatgatccggagaaacttcatgcttttccagatccgacgaatagtcagactatatatgtaaagaagataaaaaaaggggaaggtacagaatctcctaaatatacttctacagtaagtgcacattatcgtatgtcttatttcaatggagatgtagttcaacagacttatacaggaacagagccaacagagtttgattctccgacaaattttacattgaatggtgttattcccggttggtcttatacgctgatgtatatgaaagttggtgatttttggactttgtatattccttatcaaagtggatatggttcaagcactaatgatggtaacctgcaagcttattctgcattagtatataatgttaggttagagaagattgtagagagataatcttataacaatataataaatatgaatataggtgttgggtctaaacgatgcaacacctatatttttcataataataaccgagttgccttcttagagattatgcaatatcgtttttctaaaagtatataaggaattattccttttgttttgttcctccttgcttaaattacagaagattacatttttgttttttttatactactctccctaatctgcaaatgtgtcggaatcgttacctgcttgattgtcttatctccttttatctgatcgataagtagttggcaggcagtttctcccattttataagtttgatgtgatacagcagataatttcggttccacataattagcatgctgctcgtctgtatacccgatgattgccacatcattcggaatccggaggccatggtttttgacgacttccattgctgcgaaagccaatgtgtcattcatggcaagaatagcatccggaggctgtggaagtgacagtaaagtttctgtggcaatcttgccttcctcataatcaatcttccggcagactaccagctctttttcgatcggaatacgattctcacgcaaggcttccagatagccatgttttcttctctttacaatatccagatgattagctcctccgataaaagctacccgtttacttccattatccaggagatgttgtgtagccatctgtgcggattgtgccccgtctgctatcaccgatgaaaattggtcggtcaggcaaacacggtcgaacaggataagtggcatattaatgtctttcaaggcggagatgtgggagaaatcggttgtttcttgagacagacaggcgatgataccttccacgcgcatattgaccagattctcaatatttcttttttcgtgctcgtaagactcatgtgaggtcgtgataatcacgaaatatccgttggcaatagccatattctctattccattcagaattgatgcaaagaaatgagtgacaatatccgggactaccactccaatgatacgtggcgcatttttccgcaggctcatggcaaaaggattgggacggtagttcatctctttagccagtgcctttgctttagtacaaagttcacggctgatttccggactatcttttagtgccctggatacagtaggaattgatacccccaatgcttgggcgagatctttgagtgaagtatgtttccggttttccatttgaaagtctgcaacttagattctttttacaaagaaagcacattcccggaaaattaagagcatctgaagcaatattttttacgtaaaccgttacgttggtttttcgaccgctctctgctgcactgaaactattactgacctatttttgtcgcatacaaaatgatttaaaacctaaaagtatgcaataccatgaaatcggaaagacagggatgaaagtatcatctcttagttttggagcttcttctttgggaggagttttccatgatttgaaagaaaaagaaggaattcaagcagtgtttactgctgttgaagcaggaatgaactttatagatgtgtctccttattacggacattataaagcggaaactgttttagggaaggcgcttaaagatcttcctcgcgaccgttattacctttctaccaaagtgggacgttatggaaaagatggagtgaacctgtgggattactctgcaaaacgtgcgacagaaagtgtatatgagagcatggagcgtttaaatatagattttatcgacctgataaatgtgcacgatgtggaatttgccgatttgaatcaggtagttaatgaaactctgcctgctttggtcgaactgcgtgaaaaaggagtggtaggacacgttggaattaccgacttgcaacttgaaaacctgaaatgggtaattgaccattcaccaagcggtacgattgaatctgtgcttagcttctgtcattattgcctgtgtgatgataaattagcagacttcctggactacttcgaatccaaagaaatcggcgtgattaatgcttctcccctttcaatgggactgttgagtgaacgtggtgttcctgcctggcatccggctcccaaacccttggtagaggcttgccgtaaagcaatggaacattgcaaagctaagaattatccgattgagaagctggctatgcagttctccgtcagcaatccccgtatagcaacgactttatttagtacaactaatccggagaatgtgaaaaagaacatcgctttcatcgaagaacctattgactgggaactcgttcgagaagtacaggagattatcggagagcagaaacgtgtaagttgggcaaactcataaaacagcgtcattcgtatggactatacaattattgatgcgcacgcccatctgtggttacggcaggatactgttgtggacggattgcctatccggactttggaaaatggccgttcggaatttatgggagaaatccggcaaatggttccgccctttatgatagacggagtgaatagcgcggaagtttttctttcgaatatggactatgcgcaagtggctgcggctgtcattacccaagagtttattgacggtattcagaatgattatttgtcggaagtcgtttctcattatcccaaccgtttctttgtttgcggaatgtgtgagttccgcaaacctggatttctggagcaggcgaaagagcttatagccaaaggttttaaggctataaaaatacctgcccaacgcttgttgttaaaagagggacgggtaatgctgaataatgaggaaatgatgcagatgtttcattctatggaagaacggaatgtcatgctctccatcgatttggctgacggagcaacacaggttcccgaagtggaagagattattcaggaatgtccccgcctaaaaatagctgtcgggcacttcggaatggtgacacgtccggactggaaagaacaaatccgcctggcacgtcatcccaatgtgatgattgaatccggaggaatcacctggcttttcaatgatgaattttatcctttcaaaggagcagtgaaagccattcgggaagcggcggatttagttggcatggagaaactgatgtggggatcggactatccgcgtaccattacagcaatcacctacaagatgtcatacgattttgtggtgaagtcttccgagttgacggaagaggacaaaagactctttttgggagaaaatgcccggaacttctatggattcacggatctccccgtacttccttacatcaagaacatgtccgaatgatagagaaaacatccttatcgtaaaactagatttataccatgaaaaagaatacatatacaatacctttagcgttagttttctgccttttctttctgtgggcgataagcagcaatctgcttcccacaatgatccggcaattgatgaagacatgtgaactgaatacctttgaagcctcttttaccgagactgcctactggctggcttattttattttccccatccccatagcgatgtttatgaaacgttacagctataaggcgggaattattttcggactggtattagcagcaatcggaggtctgctattctttcctgccgccattttaaaagaatattgggcttacctctgtatcttctttattatcgctacgggaatgtgctttctggagacagctgccaatccgtatgtgacggttttaggagcacccgaaacagctccccgccgattgaatctggcgcagtctttcaatggactcggagcttttatcgctgccatgtttttgagtaagctcatccttagcggaactcattacacacgcgataccctacctgttgattatccgggaggctggcaggcctatatccaattggaaacggatgccatgaaactcccttatctgatattggctatactgttgattgccatagctgttgtcttcatcttttcaaaattgccgaagattggggacgaaggaggaacggcttcttccgataaaacgacttcttcgagtaaaacgaaagagggtagccagaaagaaaaactgatagacttcggtgtattgaagcactcacacttgcggtggggagtgattgcgcaattcttctataacggcggacagacggcgataaacagtctgttcctggtttactgttgcacttatgccggattgccggaagatacagcgactaccttcttcggattgtatatgctcgcatttcttttggggcgttggatcggtaccggattgatggtgaaattccgtccacaggatatgctactggtttacgccttgatgaatattcttttgtgcggggtagtgatgatatggggaggtatgatcgggctatacgcaatgttggctatctctttctttatgtctataatgtaccctacgcagttctcattggcgctaaaaggactggggagtcagacaaagagcggttcggcatttctggtaatggctattgtcggcaatgcctgcctgccacagttgacggcttatttcatgcatgccaatgagcatatctattatatggcctattgtgtgccgatgatttgttttgtcttctgtgcatattacggctggaaaggttataaagtaatcgattaataaacttattatcaaacatatcaaatgaaagcagttcaaattgtcaatccctccgaaatgaaggtggttgaactggaaaagccgaccgttggtgccggtgaagtattagtaagaatcaagtatgtgggtttctgtggctctgacctgaatacctttttaggacgtaacccaatggtgaagttaccggtaatcccgggacatgaggtaggagcggtgattgaggagatcggtccggatgttccggccggctttgaaaaagggatgaacgtgacattgaatccatacaccaattgtggtaaatgtgcttcctgtcgtaatggtcgtgtcaatgcctgtgagcataatgaaacgttaggggtacaacgcaatggagtgatgtgcgaatatgcagttttaccttggacgaagattattccggctggtaatatctctcctcgcgattgtgcgttgattgagccgatgagtgtcggattccatgcggtatctcgtgcgcaggtgatcgataatgaatatgtgatggttattggctgcggtatgattggtatcggtgccattgtacgtgctgctttgagaggggcaacggtcattgctgtcgacttggatgacgagaaactggaactggcgaaaaaggtaggtgcttcttatgtgattaactccaagacagaaaatgtacacgaacggatgcaacagataacggagggcttcggtgccgatgtcgtgattgaagctgtcggcagtccggtcacttatgtgatggcggtggatgaagtcggttttacaggacgggtcgtttgcattggctatgccaaaagcgaagtagctttccaaacgaaatatttcgttcagaaagaactggatatccgtggttccagaaatgcgttacctgccgatttccgtgcggttattaattatatgaaagaaggcaactgtccggtggaagaactgatttcgaagattgccaaaccggaaggagctttggaagctatgcaggaatggacggctaatccgggaaaggtgttccgtatactggttgagttctgataagttcttgtaataagaatagttgttgatgcctgttgtttcgggtatgtaataagtgagaggaggctgaatacagtctcctctctttgggagatagggtgatgtaacatgagtaaatatagatgtaacattcttcattcgatatgtagcatcacaaagaaatcatgtagcatactttgggcaatatatctgtttgcattttctatttttgtgatgtggaagataacaaggaacattttaaataattagctttcaaataatagataatgtagccagttaataaaaaaacgatgattatgctgaaaacaaaaatcaacactattttactgtgtactctttttacattgttcttcccgctatcagccggagcacaataccgtaatcctattctttatgctgacgtgcccgatatgtcggtgtgtcgcgcaggtgattacttttacatggtttccactactatgcacctgatgccgggagcgcctatcatgcgttcgccggacatgaaacattgggaaactatcagctacgtatttccccgcattgacgatggtccccgttatgatctgctcgaaggcactgcttatgggcaaggacaatgggcatcatctatccgctatcatgacggtaaattctatgtctggtttacagccaatggcgcgcccggacgtgggtttgtctatactgcgacagatccggtcggtccctggaaacttctttcgcgtcccccgcatttccatgacggttcgcttctgtttgatgatgacgggcgggtgtatctctttcacagtacgggacagcttacggagttgaaacccgatttgaccgatgtacttcccggtggcatcaatcagcaaatatttgagcgggatgctgacgaacaaggtctgttggaaggtagttccgtcatcaagcataatggaaaatattatttgctgatgatttctatggattggagtattcccggccgtctgcgtcgtgaagtatgctatcgtgccgataagattaccggaccttacgaaaagcgtgtcattcttgaaacggagtttgacgggcatggcggtgttggtcagggatgcatcgtagacgggaaaaacggtgaatggtacgggctgatttttcaggatcgtggcggggtagggcgtgtaccgtgtcttatgccttgtacatggacggaagatggttggcctatgctgggagacaaggacgggcacattccgaatgataccactttatcgtatatgtcaatggatggtatctgcggttcggatgatttttccgcttccgggctttccctctattggcagtggaatcataacccggtcgatcaggcatggagtcttaccgatcgtcccggatttctgcgtttgaaaacctcccgtgtggtagataacctgtttgttgctcccaatacgttgacccaacgtatggtaggaccgaaatgcatgggcactgtcagtctctctctggggggaatgaaagatggtgaccgtgcaggattatcggcttttaatggtgacagcggtgtgcttacgattgaaaagaacggaaataaactgtctcttgtgatgagtgaacagaaaagcgtgtttgagaaaacgaagcgtgccattagccgtgtggatatgaccgaacaagcccgtatacctcttaacaaagagcttgtctacttgcgtgtggaaggtgactttaccaatggacgggatgaggctcgtttttcttatagtcttgatgggaaagcatggatacctgtcggtctgtctgtcaagatgaaatttgactacacccgtatgtttatgggcagtaagtttgccatatttaattatgctacacattctgtgggcggttatgtagatgtggactcttttgattattcgttctgtgatgcgtcaatgtaacaaacaaatatgtatttgtaaccaatgaaacattgttttattggaaaataggctatttttgtttccaaattaatcataactaataagtataatattatgaaaagaggttggataccgattatgggtgtttgtttggtgttatcattttcggcatgtaagcaattgctgccttaccaggacacttctttaacggcggaacaacgggcggaggatttgttgccccggttgactttggaagaaaaagtatcaatcatgcaaaatgcatcacctgctatccctcgactgggaattaaagaatatgagtggtggaatgaggcgttgcacggtgtgggacgtgccggattggctactgtttttccccagtctatcggtatgggagcttcttttaatgattcattattatatgaagtgttcaatgccacttccgatgaggctcgcgtaaaatcgcgtattttcggtgaaagcggcgtgctgaaacgctatcagggattaacattctggacaccgaatgtcaatatattccgtgaccctcgttggggacgcggtcaggaaacttatggtgaagacccttatctgacaggacaaatgggaatggctgtagtccgtggtttgcaaggaccggaagatgccaggtatgataagctgcacgcatgtgccaagcactttgccgttcattcaggaccggagtggaaccggcatagttttgatgcggagaatatagatccccgggatttatgggaaacctatctgcctgcttttaaagatttggtacagaaagcgcatgtaaaggaagtgatgtgtgcctataatcgttttgagggagagccttgttgtggcagtaatcgcctgttgatgcaaatattgcgggatgaatggggatacaaaggcattgtagtctctgactgtggagcgatttccgatttctatagaccgggaacgcatgagactcacccggataaggaacacgcctcgaccgctgctgtgcggacaggcacagaccttgaatgtggaagtgaatatgcttcactggcggatgctgtaaaagccggtttgattgacgaaaaagaaatagatatttcattgaaacgtttgttgacagcacgttttgaactgggagaaatggacgaacaaccggcctgggcggaaattccaacctctgtgttgaatagtaaggaacatcaggcactggctttgcgtatggcccgtgaatcattggtgctcttgcagaataaaaacaacatcctgcctctgaatacccatctgaaagtagccgttatgggacctaatgccaatgactccgtgatgcagtggggaaattataacggtattccggcacatacggttaccttattggaagctgtccgtgccaaactaccggaaggacaaatcatatacgaaccgggttgtgaccgtgtggacggaaagacactccaaagcctgtttgatgaatgtagcataaatggtaaacccggtttcttggcagaatattggaataatcgtgatcgtgaaggggaagtggttgctaccgatcagatttccactccgttccattttgcaacgacaggggctactacctttgctcctggggtggagataacagatttctcggctcgttatgaatctgtctttcgtccttcgcagtcgggtgatgttgctttccgtttccaactggatggtgaagtgactcttattatagatagtgagcaagtggctcggaaaatatatgttaagaatccgacgaacctctatacgttacaggcgaaagctggaaaagagtatcatatcgagattttattcaaacaacggaatgaaagggctacacttgattttgatttgggcaaggaggtagggattgacttgaacctcgcagtgaagagagtaatggatgctgatgtgattctttttgcaggtggaatttctccaagtctggaaggtgaggaaatgccggtagaagttctcggatttaagggtggtgaccgtacagatattgaacttccggacgttcaacgtgatttgttgaaagctttgaagaaggctggtaaaaaggttgtctttatcaattattccggttcagctatcggactagtgcccgaaacgactacttgtgaagcgattctgcaagcatggtatccgggacaggcgggtggtacagctatcgttgatgctctttggggagagtataatcccggtggacgtctgccagtcactttctataaggatgtgaatcaattgccggactttgaagactattccatgaaagggcgtacctatcgatatatgcaacagcaaccacttttcccattcggtcacgggttgagttatactgactttacttatggagaagccaaattgagcaagaatacaatcgccaaaggtgaaaatgtagtattgactattccggtaagtaatgtcgggcaacgtgatggagaagaggtggttcaggtttatttgagacgtccgggtgataaggaaggtccccgttataccttgcgtgctttcaaacgcgttcatattccggcagggaaaactgaatcagtagctattcctcttaccggtgagaactttgaatggtttgatgtagagtcgaatacgatgcgtccgttggaaggtacttatgaattactgtatggaggaacttctgatagaaataagttgaaaacgattgtaatgaacgtacagtaataccgctttggaattttgtttatttttacagatagacaatccggatttatttattgaatgaataaagaaagaacgaccttgttcctttaaaaggaacgggtcgtttcttttaaaccaagcccccgtttcttttaaaccaacgggggctttcttttaaaggaaaatgaatatttgctaatgcttgatattcagtcttttaaatgatggggaataaaagtgttgaaataataggtaatatagtcatttatcttaccatttttctgttttggggctttttgttacatcagaaaagaatcatgttacatgtctgtgataaatgtaacctgtatatagatgcctgtatcatgattgtacatatatgataaaaccgaatcgatacatttgcaaacactactatggaacagaaaattatagaaaataaaaagtgataatatgagaacattaaaattgattttgtcgggctggcaatccgtgggtcttgtcgtattttttatgctgttttttaatatggaggtgagtggcaagggtaaaataacaaaaaatactcctgtctttacgcaatttatttatcagggggaggatgctatttatcaaaacaatcctttaaagccgggtgagttctataatcctattttgcagggttgctatcccgatccgagtataacgcggaaaggtaatgattattatttagtatgctcatcttttgctatgtttcccggggtacctattttccattctaatgatttggtcaactggaaacaaatcggtcatgtgctggacagaacgtcacaattaaaggttgaagattgcggtattagtgctggtgtatatgctcctgctataagatataatcccaataatgatacgttttatatgataaccactcaattttccggtggctttggaaatatggtggtaaagacaaagaatccggagaatggctggagtgatccgatcaaacttcaatttgaaggcattgatccttctcttttctttgatgataatggcaaggcatacgtggtacataatgatgctcctgctaaagcaaacgagcgttactcgggacaccgtgttataaaaatatgggattatgatgtggagaatgataaagtggttccgggaacggaccggatcatcgtaaatggtggcgtcaatatagaagaaaagccgatatggattgaagctcctcatatctataagaaagatggacgttattatttaatgtgtgcggaaggaggaaccggaggctggcatagcgaagtcatttttgtaagtgatcatccgaaaggaccttatcttccgtcaaataataatcctattttaactcaacgttattttcctgcaaatcgggcgaataaagtagactgggctggtcatgcagacttagtggagggacccgacggaaaatattatggtgtatttttaggaatacgccccaatgagaagaacagagtgaataccggacgcgaaacttttattcttccggtggactggagcggaacatttcccgttttcgagaatgggcttatccctatgaaacctacattgaagatgccttcgggagtagagaaccaaacagggaaaaacggttatttgcctagtggcaactttgtctttaaggatgatttctccaataagacattagattttagatggattggtcttagaggccctcgtgaagaattcgttgatatgaccgataaagggttgcggatcgtcccttttacctcaaatatcaatgaagtgaaacctacttctaccttgttctaccgtcagcagcataatcaatttacagcggcagcaaccatggagtacaaaccgaaaaatgagaaagattttgccggtataacatgttatcagaatgaaagatatcactatgttttcggtatcactaaaaagggaaaagactattacctgatactgcaaagaaccgaaaaaggacaagcgagtgtcctgggtgaggtgaagatagaaacagagaaacctgtgacactgcaagtagcagccaatggagatgattatcgttttaattattcgattgatggaaaggtatttatgaatttaggaggaaccgtttccggcgatattctttctactaatgtggctggtggctttacaggagcaatgattggactgtatgcaacatctgttggtaattaattagaaaccttattattctataattatgaaaatacatcatctattttggggtatatgtttatgcttcagcacaaatatcttattcgcacagaactatcagaaaacatcgtccggcatcaaaaccactgtaaatgcagtggatatagaagtacaattctttgcgcctgctgtggcgagagtaataaagtcaccggaaggtgttgcctatgaaaaacagagtctttctgtaattgcaaaacctgaaaaggtgagtttcaaagctgatataaaagataataagattgtattgaacaccagtgaactaagtgtcagtgtggacaccggtacgggaattgtttcttatttctcaaaggatggcaagtcgttattggcagagaaatccggtatgcagtttatcgatttcgatgatgccgggacaaaaacttatcaggtttatcaaccttttgtattagataaggaggaagccatttatggtttgggacaattgcaaaatggaaagatgattcagcggaacatgactaaaaatctggtacagggaaatgttgaagatgtgtcacctttcttccagtctactaaaggatatggtgtgttttgggataactattcgccgactctttttacggataacgaagttgaaacatctttccgttctgaagtgggggactgtgtggattattacttcatgtatgggaagaatgccgatggtgtaatagcacaggtacgcagcttgaccgggcaagcaccgatgtttcctttatggacttatggttactggcaaagtaaagaaagatataagagccaggaggaagtggtagacgttgttcgtaaatatcgtgaattgggtgttcccttggatggtattattcaggattggcaatattgggggcataactatttgtggaatgcgatggattttcagaatccgactttcaataatcctcaaaagatgattgaggatgtccatgcgatgaacgcacacatggctatatctatctggtcgtcattcggaccgatgaccaaaccttatagagaattggacaaaaaagggatgttgtttaacttcactacttggccgcaatcgggattggagtcatggccccccaacatggaatatccttccggtgtaagagtgtatgatgcttacaatcccgaagcgcgtgatatttattggcaatatctgaatgatggaattttcaagttgggaatggatgcctggtggatggactctaccgaacccgaccatttggactggaagccggaggatatggataccaaaacctatctgggctcgttccgtaaggtgcgcaatgcttatccgttgatgactgtcggaggggtttacgaccatcagcgtgaagtgacttcggacaaacgtgtgtttattttaacccgttcgggatttttggggcaacaacgttatggtgcaaatgtatggagtggtgatgtcgcttccacatgggagagttttagaaatcagattcctgccggattaaacttttctttgtgtggtatgcctcactggaatagtgatattggtggcttttttgcaggacactataataaaagctggaatgatgatagtgcttcaaaaaatccattgtatcaggagctttatgtgcgttggttgcagtttggaacgttcaatccgatgatgcgttcgcacggaaccgatgtttacagggaaatttataaattcgggaaaaaaggcgaacctgtatatgacgccattgagaagatgataggtttgcgctactctttattgccttatatttattctacttcttgggaggtgagcaatcgccaatcgagttttatgcgcgctttgatgatggattttgtagatgacagaaaggtgtgggatatcaatgacgaatatatgtttggaaaatcgctccttgtagctccgattgctcatgcacaatatacaccggaagctgtggtaaaagtctccgaagaagaagggtggaacagagatggagtgaaaaaaacagaaactgacgttgctgtggatttcatggaaacgaaatctactaacatatacttaccggcaggaacgctatggtatgacttctggacaaacgagaaacatgaaggcggaaaggaaattaccaaagagactacactggatgttattccattgtatgtaaaagcgggtagtattattcctgttggtccacaagttcagtatgcaactgaaaaaccgtgggatcatcttgaattgaaggtatatgcgggtgcgaatggaaacttcattttatatgaagatgaatttgataattacaactacgaaaaaggcgtttatacggaaattccaatctcttggaataatgcatctcgtaaattgacgataggggcaagaaaaggtgcgtatgagggaatgttggagaaccgtaagtttactgtaacccttcaggacggaactcaaaaaagcgtcgattataatgggaaggcaatttctgtaaagttttgattgtaatagaatgtgtgattatgtcagtagagaagaatctgaaaaatagaaatatgatgaagttttttatagtaatggctatgctattgggtagtagtgttgcaagtgcagaaaataaacagataacaagtcctgatggaaagttggtagtaacagtctcagatatggatggaagaccttcttattctgttagttatgacaatattctctttttgaagccatctccattggggatgattgcaaatataggagatttctcatcggggatgtcgctggagaagaatgtttcaaccaataaaatagatgaaacatacgagttggcttctattaaaaagagtaaggtacattatgtggcaaatgaagctgtattttcgtttacacaacaagggaaaacaatttatgatgttatattccgcataagtaataacgatgttgcttttaaatataggatgtatccgcaaggtgagacactaagttgcgtggttaagcaagaagtcacaggatttgtgtttcctgacggaaccaccactttcctttgtccgcaaagtaaaccgatggggggatttgcccgtacttctccaagttatgagacgtcttatacagcagatgatgtcgcaggcaaaaatggctggggagaaggatatacatttccctgcctattccgtaatggagataatggttgggtgcttgtttccgaaacgggagtaaatggtggatattgtgcgagccgtctgttgggacacaaaggaggagtgtataccattggatttccgcaagaaggtgaagcaaatgggaatggtacggtttctccggggatagcattaccgggcgagacgccttggcgtactattactgtgggcaagactttggctccaatagtggagacaacggttccttttgatgttgtaaaaccgctttattcggcaaaaggagagtatacgtatggccggggttcatggagctggattatcggtatggatggaagtactaattataaagagcaactccggtatattgatttttcggcagcaatgggataccagtccgtgttggtggatgccttgtgggataaacaaataggacgtgataaaattgaagaattggctaaatatgggaaggacaaaggggtagctctttatttgtggtataattcgaatgggtattggaatgatgctccgcaaactccgagaggtattatggataatgcgatagccagacgtaaggagatgaaatggatgcaaagcattggtatccgtggaataaaagttgactttttcggaggtgacaagcaaatgactatgcagttgtatgaggatatcttgtcggatgcaaacgagtacggtcttttagttattttccatggatgtactttgcctcgtggctgggaacgtatgtatcctaacttcgcatcgagtgaggctgtattggctagtgaaaatcttcatttctctcaaggcagctgtgatcatgaggcctttaatgctactttgcacccgtttattcgtaatactgtgggtagcatggattttggaggtagtgcattgaacaaatattataatgcggataatgctccacggggaagccggcgggtgacatcagatgtctacgcactggctacggcggttctatttcaaagtccggtacagcattttgctctggcaccgaataacctgaccgattctccgtcgtgggctattgattttatgaaagaggttccaacgacttgggatgaggtacgtttcattgacggttatcctggcaaatacgttattcttgcccgtcgtcatggagacaaatggtatattgccggagtaaatgcgcagaaggaaacactgaaacttaaagttaatttgccgatgttctccaatggagaaaaggtgagactgtttagtgatgataaggcattacagggtggtgtgaaacaaatagaaatagggaaaaagcaggaactgcagctatctattccttgcaatggcggaatactgattactaagtagtttattatgaaatgtaatatgaagtatattgttgtatttatattctttttctgcatattggaggaagtccacgcaaagagccgggtagaatatagaaaaatgccatgcacaatgttgcaaggtattacagagcgggaatatacgatatatttgccggatgattattatttatcggatacctgtagttatccggtattatacttattacatggtggaaattgctcgaatacagattgggttcattggggcaatttacaggtggttactgactctctggttgccaaaggactgtcatctaaaatgattatcgtatgtccggaggcgaataagaataatatgatttggttcaatgctccccattggaaatatgaggactttttcttttacgaatttgtgccttatattgaaactcattacaggataaagtctgaaaagagattccggtcacttgccggatactcgatgggtggcggagcatctattgtgtatggtctatatcatccggagatgtttaatgttgtatatggtatgagcagttatcttcgcagtcagtatttagagtttctgaaagatgatccttctgctccatggcgtcagcaattaattgatgataataatccgattcacacaatacagtcaggaactgcagacgagattctgaagtggaaaaagatacattggtttattgattgtggagataaagactttacgtatgaagctaatgtggatctgattaaagcttttcgcgaccggaatatcccttatgaattccgggtaaaggaaggagggcacgattgggattattggcgtatagcgctgtgtgatgctatcgtttatatttcacaaaaaatggatttatgacaatattatttatgaagaaaaaatatcagttagaacgattttttgtgacatggttaatgattctgtttatgatcttaacagatgctttcactgcttttgcacaggttaagcaggctactgttcttgtaaatggtatttcttgtgatttggaacaaggcatattaaaagtcgagtttgtgactccggatgtggtaagagttcaatatacgggggaaaatacgtttatgggaaatggaacggatgtttgtttgtcacgtacagttgataatcctgttcgttgggtatataccccaaatccagattgttatttattaaaatcggatagcttgatagtcagagttgatttaagtactgcttctatcacttatttggataaagaggggagattattattgcaggaagatcaaaatatacctcgaatcagtgaaaagagagtgacgaagcaagtcatatatgatgaacattcaaaacatatagagaaaactgcggatggtgataaagaaataaaaaatgttttgcgttatgatatcatagggcacacctggaaatataggattaattttaaatggcaaccgttggaggctttatatgggtggggagctcacatggaagactatatgaatttgcgtggtaaggaactttatctgtgccagcataatttgaaagctatggtaccggtgctaaattcaacagccggttatggattactgtttgacgcgggatgtgccatgatgtttaaggataactcggaagggagttttgtagaacttgaagcagctaaacagattgattattactttatgaaaggtaagacgatggatgctgtggttgctaattatcgtttattgacaggcaattctccaatgatgcctctctatctttttggatatattcaatctaaagaacgctatgtcagttccgatgatttaattaataccttaaaagagtatcgccaaaggcaaataccgatcgatatgattgtacaggactggaactattggccggaaggccaatgggggaatatgagtatgaatcctaaattctatcctgacaaaagaaaactggcagatgaaattcattctctacatgctaaattaatgatatcaatatggccgaatgccatgaactgtcctcaacatgaggaatttaaacgaaagggatggttgttaagcggcacctctgtctatgatgcttttaatccgttggcaagaaaattatactggaactatgcgaataatgagttttttggtaatggttttgatgcatggtggtgtgacgcttcagaaccattagatgctgattggacttttatgaaggatggttatggagcggataatcatcggcaacgttgggagttaaacacgaatttgctgaatagtgtattgggggcagagcgaagccagttgtattcattatatcatgcgaagggaatttatgagaaccaacgttctacaaatgaagataagcgtgttgtaaatcttacccgttctagttacgcaggtcagcaacgttattctacaataacgtggaacggtgatacttatgcaacttggcaatcttttgctcaaatgattcctgccgggttaaattttatggctacaggctgcccttattggacagtagatattggggccttttttacaaaaaatggacctcaatggttctggaaaggcgactatgataaaggagtggctgatatggcttatcgggaattatacactcgtatgtttcaatatggagcgttcttaccggtgtttcgaagtcatggttccgatactcctcgtgaagtatggcgttttggtaaaccggatgagcctttttatgatagtttgattaaagtgattcatttaaggtatcgcttacttccttatatctattctttagcaggcaaggttcaccgtgaaaattatacaatgaccagaacacttgcgtttgactttgccaaggatatgcaggttgctgacttaaaagatgaatttatgttcggaccagctttattggttgctcctgtcaccaatcctatgtattattcggtagattcccatcctttggaaaatgtagataaggtgcgtcgtgtgtatttaccggatggagccgattggattgacttttggaccggaaaaaaatataagggcggacaatggattgtcgctgaagcaacgataaataaaattcctctattggtgcgtcaaggatctatcattccaatggggccggttatgcaatatacctcggaaaaaacagatgcagagtgggagatacgggtttatccgggagccgattcttcatttacggtctatgaagatgaaggcgacaattacaattatgagaagggggactcttcaagttttgaaataatttggaatgataaaaataacacattgacaatctctgaccggaaaggtggatattccggtatgactgtatctcgcaaattgaagttggtaaaagttgatagaaagtcgggaatagatgtgacagaaagtatcaatggaaagaccatagagtatagaggaaaacagctgaaaataaaaatgtaaagtagtagaatctaaaaccatttaaaataaaagaatatgagaaacttaaaatttttaggcgtgtcgtttttgttggcaatgactgtcgctacttcaggagtggcacaaaatcctattatccagacaaaatataccgctgatccggctccgatggtatataatgataccgttttcctttatacaactcatgatgaggatgatgccgaaggattcaaaatgttggactggttactttatacttccaccgatatggtcaattggaccgatcatggagctgtcgcttctctgaagagttttgattgggtgaaacgtgataacggtgcctgggcagaacaagtcatcgaacgtaatggcaaattttatatgtattgcccgattcatggtaatggtattggcgtattggtctccgactctccttacggcccttttaaagacccattgaacaaaccgttggtttggcaaaaggagcattggtatgacattgacccgaccgtatttattgatgatgacggacaagcgtatatgtattggggcaatccgaatgtttattatgtgaaactgaatgaggatatgatttcatattcgggggaaattgtacaagtggaaaataaaccggaacattaccaggaaggtccgtgggtgtataaacggaacgggcattattacatggctttcgcttcaacttgttgtccggaagggattggctatgccatgagcgacaaagctaccggaccatggagtacaaaaggatatattatgcgtccaacagagcgaagtagaggaaatcatcctggaattatcgattataaaggtagctcttatgtatttggcctaaattatgatttgcttcatttggagactttggatcataaggaacgccgttcggtctctgttgcaaaaatgcattataatccggatggaactattaaggaagttccttattggcaggagacgaaactggaacagattgaaaactttaatccttaccgtagagtggaagctgaaacgatggcttggggatatggtcttaaagctgaaaatcataagaatggtggtttgtatataaccgatattgatgataatgaatatctgtgtgtgcgtggtgtcgactttggcaagaagggagcaaagaaattcagtgtaagcgcagcttgtgttgaaaaaggcggaatgatagaaattcgtctggacagcactgaaggtccggtaataggcagtgtcagtatatcaccgacaggaggactggatatatataaacagatgtcatgccggataaagaatgcaaagggtgtacatgatctttatttctgctttaaaggagagaaaggaaacaaacttttcaatctggattattgggaatttgaatagcttttattcaaaaaaaataagattgtaatgtgcttataatcagtgtaattattagggcgtgctacaaggggaaagatagatgtaacattgaaaatgaagatgttatttaggaaaagaagcccgtaacataattatgtttgtagttttataagctggcatatctttgcagaaaaagatcagtaattcatatttgattataaagaaaataagaggtattatgaagaatacacaggtaatacaattaatgtcaatcgtccggctctccatatttatgttggggataacaatgatgtcatgtaactcaaagaaagaacaacaattaccggctattggaaaatctgtggctctctttgattatttttcttataaaggaaatgatgatttttatatttccaatcctctgtcagatgaagactatttctataatcctattttgccgggatggtattctgatcctagtgtttgcacaaatggagaaggtgattatttcctggtaacatctacattcacttatttccccggtgttcctatttttcacagcaaagacttggtgaattggaaacagatagggcatgtgttgaaccgtgcttcgcaattagtgaatatggaaggacagaaagtgagtggcggtatttttgctccggctatttcttataatccgtataacaagacatattatatggtaacaaccaatgtaggagccggaaatttctttgttaagacgcaagacccgtttggtgaatggtcggaacccgtcatgttgccggaggtcggaggtattgatccttctttcttttttgatgaagatggtaaggcatatattgttaataatgatgaggctccggataataagcctgaatatagcggacaccgtactatacgtatacaagagtttgatgtgaaaacagataagacggtcggtccccgtaaaattcttgtaaacaaaggagctcaaccggcagacaaaccaatttggatagaaggccctcatttatataaaataaatggaaagtacttcttgatgtccgccgaaggtggaacgggaaactggcactcggaagtgattttccgtggtgattctccgatgggtaagtttcttccatggaaaaacaatccgattctgacgcaaagacatttgaattctgaccgtcctaattcggtaacctgtgctggtcatgcagacttgattcaaacaaaagagggagattggtgggctgtttttctggcttgtcgccctattaataatcagtttgagaatttgggacgtgaaacatttatgatgccggtgaaatggagtgaagatggattctcgtacatgacacaaggcgatgatttagtacctatgattgtaaaacgtgaaggtgtgaaacgcgatacgacagttacttatggtaatttcgagttagtagcgaactttgattctcctgtacttgatatgccatggatgactttaagaacttctgcatccgatctatattctttgtcggaaacacccggatacctgaccttgaagtgtgcagatattagcgctacggaaaagaaaactccggcatttgtttgtcgtcggttacaacatcataaatttgaatgtgctacacgtatgttgttcaatccttctaacgataaggaaacagccggaatgctgttgtttaaagatgagacacatcaatatttcttctgcttgaataaagtgggtgagaataaaaatatttctctgaaacaaatcggtgaaaaggaacagacattggcttcagatgaaatagacgcagatacaaatgaagtatatttgaaattagtatctcaaggaattggttacgatttctattattctattgatggtgaaaaaagctggaaactgctttgtaaagatgtagatcccagttatctctctactacaacggctggtggatttaccggtactacaattggattatacgctacttgcaaataattattttttttatataaatctaatactagtaactatgagtgatatttataatgatagctaatgcaattaaaaaaagaatgatgattagaaaacaatgtagttaattaacatcttaaactaatggtaatgaaaaatgtaacgaagaaaattcaaaaaattccttacctgtttctccttatgttgtttagttttgtaacagcatcagcacagaaagggataacggtgaggggaacggttcttgacagtaatggtgagacaatcattggagcctcggtaactttaaaaggtaataattcagtaggtacgatctcagatatagatggcaattttgtgttgactgtgcccagtgagaagtccgtccttattgtttcgtatgtaggaatgaaaccacaggaagtgaaagtatcttccaaagggatgataaaagtgacgttggaagatgataccaaacaactggaagaagtagtagttgtaggttacggacaacagaagaaagcgtcagtggtaggtgctatcacgcagacaagtggcaagacactggaacgtgccggtggtgtaactagtcttggttcagcattgacagggtctttgccgggagttattacttctgcttcttctggtatgcctggtgcagaagatcctcagattatcattcgtacacagagctcgtggaataatagtgaacctttaatattggtggatggtattgaacgtgagatgagttcggtagatatctcgtctgtagagaatatttcagtgctaaaagacgcctctgctacggctgtttatggtgtgaagggtgccaatggtgtaattcttataactaccaaacgtggtaaggaaggaaaagctagtgtgcaaatcaaagctaatgtaacagcaaaggtggcatccaaactaccggagaagtatgatgcatacgatactttttatctgttgaataactctattgaacgcgaggcttgtcttaatcctaatggctggaatgactatactccgacttccattattgataagtatcgtcatcctgccaatgcggaagaatgggatcgttatcctaatactgattgggaaaaagcactgtttaatagtacagccatgtcttacaataccagtgtcaatgtttccggaggtacaaaaattgtcagttattttgcagcggctgattttgtaagtgagggtgacttgtttaaagtatatgataaccgtcgtggctatgattatggttttggctataatcgtattaatgtgcgtagtaatttggatttccaattgactaaaactacaaagttttctaccaatctatttggatcgaatgctcagcgtaccgtaccatgggactataatgaccaagatgcaactttttgggcagcagcctataaaagtgctcctgatgccatgcgtccgatttattctaacggtatgtggggatggtatcaacctcgtgatgccgatgtgcctaactccgtatacaaactggctgtagcagggtcggagaaacgtacgactacaaagatgacttcagattttatccttgagcaagatttgcatatgcttaccaaagggctgaaattcaaagctaatttctcaatggactatacattcgttgagaataagcgtggcgtcaatgatatgtatcataattctcagcgtatgtgggttagacctgatactggagaaattattttggaacaaccggagcttggtaccggtttggatgctattatcaatcctatctattgggaacatcaggctggtagcgtgaatactggtgctacttatcgtaagctttattattccatgcaaatggattatgcacgaaatttcggtaaacatgaagtgactgctcttgctcttttcagtcgtttgaaagaagcgtcgggcagtgtgttccctatttatcgtgaagattgggtgtttcgtttaacttataattatgctatgcgctacttcttcgaaactaatggtgcctataatggttcagagaagttcggtcctgattaccgttttgcttttttcccttctttttcattaggatggatgattagcgaggaaaaaattgttaagaacaacctgaaatttctcgatatgttgaagttacgagcttcttggggtagagtgggagatgatgcggtggttcagccttggcaaagatttacagatggtcgtttcttatataaaaatcagttggattatggaggtaacacactaatgggtaatattaagcctgccaatactccttatacttactatacaatcagtcgactggggaatcctaatatctcatgggaaactgtagaaaagagaaatttaggtattgattatgcttttttaggaggggcggttgccggttcggtggatatattcaatgacactcgtactgatattttagtgaagggaagcgatagagcgatagcttcttattttggaactgatgctccttatgctaatctcggtaaagtgagcagtcatggttatgagttggagttgagattgaaccatacttttaataatggtattcgtgcttggctcaatactagcatgactcatgctgtcaacaaagtgaaattccgtgatgatgcacctttgaaacctgattaccagaaaggggcgggacatgccattaatcaggtatattcttatattgatcatggtaatcttgctacatgggatgacgtgattggaagtccggtttggacaacgggtaatgatgcaaaactccctggggattataacattgtcgattttaatggcgacggtgtaattgatgctgatgaccgtgctccctatcagtattctacgatgcctcagaatacttacaatgcttcaatcggagcagaatggaagggatttagcatttttgcacagttctatggagtaaacaatgtgactcgtgaagtcaatttcccgacgttccgtagcactgctcatgtagcttatgctgaaggtgattattggactcccgatgggagtgctactctgcccgcaccgcgttgggggaccactattgatcaagcagcatcaggcactagatattggtacgatggttcttatttgcgtttgaaaaacgttgaattgtcctatactttccaaaaatcaaactggttgaagaagatggggatcaaaaactgccgtatatatctgaacggtgataatctttatatgtggactaaaatgccggatgatcgcgaatctaataccggatatagttcttctgatggtgcttatccgacaatgcgccgtttcaatcttggtatcgacattactttataaatactaagtaaagactatgaataagtatattaataaaatattccttacgtcggtcatcactttggccggtatgttgggagctacttcttgtactgactatttggacaaatctccatatagtgacattgaagagaatgatccatataagaatttcaagaatttccagggatttaccgaggaactctataactgtatacctgttgtatcaaacagtgagtatcatactagttttaattttggtgaggaagattattgggagccacaggagcttcgcctctttgcccgtaatattgactatggtgatttctggggatggactacctgttattattcttatccttcttctatacgtggtggaaaggctaattcacaggaacgcagtgataagggtaatctgtggaaactttgctggtatggtatccgtaaggctaacattggtatagctaatcttggtaatttggtaagtgctacagaagaagaacgtaatcttattgaaggacaactttattttttccgtggatggtttcattttatgttgatggaatggtggggtggaatgccttatgttgaccaagtattaccgccggatgttgctcctgcattatccaggcttacctggcaagagtgtgctgaaaaatgtgtggctgattttgaccatgctattcctttgcttcccgttgactgggatcaaacaactgctggtagagctactcttggtttgaatgatactcgtattaataaaattatggccttggcctataaagggaagacattgctttgggcgggtagtccgctaatgaactgggcttccggaggtgacaaagagtatgatgcgggacgttgtaagcgtgcagctgaagcttttggcgaagctttgaagattgttgaggatactaaacgctatgaattagcagatatggaaaattataacgacctgtttgtcgtatacaattccggcggtaaacttaacggggtgaaagaagctatcttccgcgaaaatttagtgcagtatgatggtcgttggaactataacatgaatacggattttcgtccgcgttctcatatcaatgctggtattaaatgttatccgactgctaattatgtaaattattttggtatggctaatggctatccgatcaaagatatgacaaaagccgatgcagaatcaggatatgatcctaagtatccttggaaaaatcgtgatccgcgtttttataaagacatcatatttgacggtgaatggtgtggagaaactggaaacggacaatattgccagttgtatacgaatggagcggacagtgaagagaaagatccacagaaagggtgttttacaggttatatgaatagtaagctctgtctaaaaatagtgaataatgctaacgtcagaggtgctcactacgctgttttaagtttgatgcgtttagcggatgtttatctgatgtactcggaggcaacggctgtaggttatggctctccgcaaagtaaagcttctagcttctatatgacggctgaagatgctatcaatgagattcgtgatcgtgccggtgtggctcacgtacttgatcgatttactggaaatacgacagactttcttggtgagattcgccgcgagcgtgccgtagaacttgcttttgagggctttcgctttatggatctccgtcgttggatgcttcttgataagagtccttataccttgaagacaaagattgagtttgaccgtgtccctaccgcaagctataacaaagagcatccggaggagaatgaaatcatgaacttgaaagaagtggtactggtggagagaaagtataccgacagacactattggctgccattacccaaagcagatgtttacttgtatgaaggctttggccagaatccgggatggtaatcatgacgtattaactaataatgacgcgaaatatgaatagaaagtttatatatatcggctgtactgtttttgccatgtcattgcttagcatgacaggtgtgcaggcacaggaggaaagcaaggacagcttagtgaatgtggctttcggcaaagttgctcaggaagatttgactcatgccatttctactgtcaacacgtcagagctgacaaagaagactgctaacaataatagccttgtgggccttgaaagttttgtcggtggttacaatggatcatccctttggggacaaggaccgttggtactggtagacggtgtgcctcgtagtgcatcaagtgtaaaggcttcggaagtggaaagtatatctatgctgaaagatgcggcagctgtggtactctatggtagccgtgccgcgaaaggagtaattcttatcactaccaagcgaggcaaagattcacccatgcatatcgatgttcgtgccaatgtaggggtgaatgtcccgaaggcttatcctaagtacttggatgcagattgttatatgaccatgtacaatgaagcttgtcgtaatgacggtatagcagaaaggtatgatgccggtactatttataacacagcaatgggtactaatccttatcgttatccggacatagacttttatagttcagattatttaagaaagttctatactaattctgatgttacgggtgaagtgtatggaggtaatgaaaagactcattattacttgaacttcggtatgaattatgctaatagcctgttgaaatacggtgagtcaaagaaagcttatgatatgagttttaatgtacgtggtaatgtggatatggcactggcttcatggcttaaagcaactactaatgctgctattctctttgacaatagttatcaaggccgtggtgacttttggggagcggcttctacattgcgccccaactggtttgcaccattattacccattgatatgatggatcctaatgttgcatatatacaggaatatataactaacagcaatcatcttatagacggtaagtatctgttaggaggtacttcggcagacacgacaaacccgttttccgaattgcttgctgctggatatacgaaggaaaaagcacgtagatttatgtttgatgtggctgtgatggcggatcttggaggcttgttaaagggcttatctttcaaaactgcttatagcgtagattacacttcttattattcagaagcttatgctgaaaagtatgctatttatgagcctaaatggtctaatgtgaatggtaaggatatgattatcggacttaccaaattcaatgatgatacaaaatcaactaacgaatatgtaggtaaatcgacttacgaccagaccatgactttcagtgcacagtttgattataaccgtacatttaagacattccataatgtatctgcgaccttgttgggatggggatatcagacacaaagttcggctgatgaaggtcatgagagtagtgattatcatcgtaccagcaacgtaaatctgggattgcgtgcttcttataattacgatcataaatattatgcagactttagtggtgctttggtacattcagccaagttgccggaaggaaatcgcaacgctttttctccatcggtcactttgggatggagacttagtaaagagaagtttatggaaagtgtaggctttgtggacgatctgaagattacggcttcttatgccaagttgcatcaggatcttgatatttctgattactatatgtataagggctatttttctgacaaaggcggttggtttcaatggtatgacggaacggtgggtggtaatacgaccggttcaaaacgaggtgacaatccgaatcttgactttatcactcgtgaggaagttcgtgcaggtatagacgccactttattcaatagactgttgagaattaatgcgaactattttactcagaagactagtggacttctaactcaaggtgcttctactatttatccttcgtttttcgatttaggtacagatctttcatttttaccttggatcaattataatgaagacaaacgtactggttttgatttttcactaagtgcaaataaaaagataggtgatttcgacgtgactctcgggtttaatggaatggtattttcttcaaaagcttctattcgtgatgaagtggcgaatgagtcttatttgttgcgccaggggcgtgcacttgatgcaacttatggatatgtttgcgaaggtttctttcaagatcaggctgatatcgagaaacatgccaagcagacattcggcacagttcgtcccggtgacctgaagtataaggatatcaatggtgatggtgtaatcaatagtgatgaccagattgatctgggtgcaggcgggtggtctacatcaccatttacttttggtttgaatttgacattgaaatacaagaactttactctttttgcaatgggatcgggacaaaccggtgcggtggcttttaaaaataattcttattactggaacagaggtacgagcaagttctcagaaatcgttatgggacgttggactgaagaaacgaaagaaacagctacttatcctcgtctttctaccagcaatggtgataataacttccgtaattctactttctggatgtacaagaataatgttttccgtttgagtaatgtgcagcttacttatgattttcctacagatactttcaacggaactttcatacgtggacttagcttgtattgtggtggaagcaacttacttacaatagcaaaagaacgtgagtatatggagatgagtttgggggctccccaataccggaatttctatctaggctttaaggccgcattctaaatctaactaaaaaagatagtacataatatgaaaaagaaaataatatttttggtagctgctgccttgatgctgaatagttgcgatgaccttttcgagccggccattgagaacttcaaggatgtggaacagatgtacgacgatgctcaatatgcacaaggcttcctggtgaatgtgtaccgttgcgttccgggatactatgataatagtgaatatgcaacagatgatgctgtcattaatcagaagaacaatgcatttctcacgatggctaccggtggttggacttcccggttatggacgcctatcaatcaatggaccaattcgttcagttctatccagtatatcaatcttttcctagaaaatgtggataaggtaaggtggtcggatgatgcagagaaagcacaattgtttgctcgtcgtaccaagggggaagcttatggacttcgcggtatgtttttatactatttgcttcgtgcacatgctggatttggagaaaacggagaattgctcggtgtacctcgtttgacagagtatcttactataaactcggaccttaatttacctcgtgcttcgtttgctgattgtgtacagcagatatatagtgacttggaaaaagccgaagaattacttccttgggagtataatgatgtgaatgaggtacctgccgattttcagagtattactcaggataaaggtaaatataatactgtaatgggagagaagtcccgtcaattattcaatggtctgattgcacgtgcttatcgtgttcgtacagctcttttggctgctagtccggcttttcaggatgcctctaatcctgcttcatgggccgatgctgctaatgcggctgccgctgtactcaactacaatggaggattgggcggattggatgataaaggagtggaatattattcaaaagaggtagtagagaacttgcaaaaaggcattaatcctaaagagattatttggcgtgaaaatgttagtaatagtgaggctgccaattcacaggaggcaaataactttccgccttctttgaatggtagtggcaatatgaatccgtcacaaaaccttgttgatgcgttccctatggctaatgggtatcctatctcggacattgctaacagtaactataataagaataatccttataatggacgtgatcctcgtttggcaaaatatattatctataacggaagtatagctggagtaggcgatgtacctatatatacagggcgcaaatcgggcactgatgacggtatagatgtgaaagagcagagatctacacgtaccggttattatatgaagaaaagactgcgtatggatgtaaatcgtgcgctcggatcggttacgaatcagcagcattatattccacgtattcgttatacagagatgtatttggcttatgctgaagcggctaatgaagcgtggggacctaaaggagataatggaaatggttattcggcttatgatgtaatcaaggctattcgtaagcgtgccggtataggcggtacttctgatccttatctggaacaatgtgcgggcgatagagacaaaatggctaatcttatccgtaatgaacgtcgtctggaactctgttttgaaggtttccgtttctgggatatacgtcgttggaaagaaaacttgaacgagccggtacgtggtatcgactgggacagagatggacattcttttaatgaattcgttgtcgaagaacgtaattatgaagattacatgtattattgcccgattccaaattctgaaatactcaagttcagcaaccttgtacaaaatagagggtggaaataattatagaattatatttaattaaaagtacgttatgaaaaagaacttagcatatatcggactggttttattgatccttacttggacgtcatgcgaaagtagtgacaatgaatttcctgatttcgattaccagacagtatattttgccaaccaatacggacttcgtaccatagagcttggtgagagtgaatttgtggataatactcttgacaatcagcataaaatgataataaaagctgcttggggtggaggatatactaatagaaacaatgtggtgataaactttaaagtggatgagtccttgtgtgacaatctttattttaaagatacagatcagcctcttgtccctatgccggcttcttattacacgttggcttccgatcgaattgcgattcctaaagggcaaataatggcgggagtagaagtgcagttgacggatgatttttttgctgatgaaaaatcgatcagtgagaattatgtcattcctttgttgatgactaatgttcagggggcggactctattttgcaagggaagccagttgttgaaaatccggtgttaactaatgccggtgattggagcatattgccgcagaattttgtcttgtatgcagtgaagtatgtgaatccttggcacggagagtacttgcgtcgtggtattgatcatgctactgtagcaggtacatcaaaagatattattcgccatgaacagtttgtggaaaatgatgaagttgtgaatatttctactaaaagtatgaaagacaatcttttgacattgaaaaccaaggatgaaagtggtaaggatattagctatactgttcgtttgtcatttgcagaagatggttcgtgcactgtacactctggttcgcagaatgtagtggtaagcggtagtggcaagtttgtcagcaaaggtgagaaaaatagtcttggcggaaaagacaggaatgccatttatcttgactatacagtcaatttgacagacaataacattcagcttgcaacaaaagacactttggtgttacgtacacgtaatgtgtatggtggcaagtcactcgaagtagtgagaaaatgatgttttgatatgaacgttaaaatcaagagtatatgaaatacatcaataacaagataattgcttttacactgatcgctgcgtcgataatgtcgtgtacagacgaatataattgccagcttcaagtagagaaaccacagaatgcagctatcaacgaatatttagctcaatttgacctgctgaagtcgtatattgaccgtagtggcacaccttttcagttagctgtaaatgtaccgggaagcgaatttgtaaagaaagaaattgcattcagtacagtgtttaccaattttgatgcagtggatatgaacggttcttatgatccgctaaatacactaaaggaggacggtacttacaattttggtggcatgcaaacggctgccgatgtagcagcggaggctggcgtgactctttatggaggggtactttgttcaaaccaaggacagcgtgccgcatattataataagcttatcgagccgatagatattccggtggaagtacaaaaaggaacgactaaattgtttaatttcgaaaatgatgaaattggtacaagttatcctatgactggcaatagttcggctgtagtcgaagaggatcctactggtgaaagtggacatgttttgcatgtgggaacagatgatgtaaaagcagcttattcttatcctaagtttcacgtagttttacctggaggtagaaagcttggtgactatgtcagattgaatatagatttgcgttttgtaaaagatcacggaatttatggaacaggtttgcgagttttcattcagggacaggaatttaatttaggaacgaatggagctactttctgtggtgcaggtgacaaatggaaacgtgaaggaacaattaatctgaaagatgctactgctcccggattggtagtacctgaaagttttggaagtctgacagaatttgatttagcgataggttctgcatccactagtgcacaattttatctggataatatttctatggactatgaagtatccggaaaaggtactacggttatcaattttgaaggggataatctgaatacagtgtatcctatggttgctggagctggtgctcccaatagcggtacagctactgtagtagaagatccagaaagagagactggtcatgtactttacatagatcaggcttcgcattacttcccggaatttacagttaagttagctgaaggcaagacccttggagattataccggcatgtcaatggatatgcgccttttaaaggggatgtatggttatggaatgtacgtgaaaattaatggtcagttattaaatcttcatcaaaatgcagctgcttacggttacgcagagaatgatacttggaaacgtgatggtgtatttgtgacctttgtgaaggaaggtacttacactgctttgggtgaagcggttccagctactacaattgagatacccaatgtaatgaaagacctcaatgaaataacatttgcgatcggttccagttctggcaactggacagcatacatcgataatttgatttttacatgggaagccaagccacaacatatcgaaaagactccagaagagaaaaaggaaatcttcactaaagaaatggaaaaatggattggtggtatggtgtatgcaggtgtgaatgaaacgaagagtgtaaaagcttggaatataattggtaatcctttggataagactgttaatgataatacatttaactggggtgaatatttgggtgaagtagactatgcacgtaccgccgtgaagattgcccgtgatacagtgaagaatgccaatgtagatcttgagctttttgtcagcaacacatttggtcaatatgatgaaatggggaatatggctgatgaactcatatctttagttgatgcttgggaagcagacaacgttaccaaaattgacgggtacaatattcttcttaatgcaatttattccaaagatgttgttttccaggaaggcaataaaacgatgatcaccaatctgtttgataaattaggtaagactggtaaactgatacgggtatccgatcttagcatgatggttgaagaactggatggcaactttattgcgattaataaattaacagaagaagatagagctgccgctgcttcttatatggcttttatcatgcaggagtatcgaagacttattcctgcggacaagcaatacggaatctctatatcgggtattacagagaccaatactggttataaactgtgtccttggacatcggactataaccgtaatgaaatgtatgaaggtatagtggacggattgaaataatcctctcctctggattaaaaggactatttatatatgaagaatattacattattattttgtctctttcttgcgaatattctcttgggggcttgttcgggaggggaagatgaaaaaaaagaaatggatgaaggaaagggcgcgtatgcgttctttcttaaaaaatccattactgtgagtactggggaaagtcagacggatgttgtggtggaatgggcgaagacttcttgggagataactatcggtgaaggagagatcgtaaaaagcgttactcctacatcaggtgggaatagtagtggggaaaaacagtacacgaaggttcgtgtatcttgtggggcaaacagtacgatgaaaaagcgtacgcaaaccattcacttgttcgataaaactaatgaaacaactgttgatttgttggtagaacaagaaccgccattcaagtcggttacactaactgttgatcctatggtgaagtatcagccggttgtaggatttggcggcatgtacaatccgaagatctggtgtggtgacaatcttatttctgcaccacaattagacaaaatgtatggtgccggcggattgggatattctatccttcgcttgatgatttatcccaacgaatcagattggagtgcagatgtagaagctgcaaaggcagcacaagctaacggagcaattatctttgcatgtccatgggattgtacagatgcgcttgcagataaaatcacggtgaatggaaaggaaatgaaacaccttaaaaaagagaactatgaagcgtatgcaaaccatcttatccgttatgttacatttatgaaggaaaaaggggtgaacctctatgcgatttctgtccagaacgaaccggatatggaatttacgtactggactccttctgaagtagtggattttgtaaaacaatacggagcaaggatacgggaaacaggagtgaaactgatgtcaccggaagcctgtggtatgcagcctgaatatactgatcttattatcaacaacgccgaagcatttgctcaaacggatattctagccggacatctctatcaagggtttacagatttgagtagcggatatgttaagaaccgccacgattacatctgtggtgtgtattcacgtattcaaggaaagacatggtggatgacagaacatctttttaatgacggtgagaattctgatgattcttcgaaatgggaattcctgaaatggcaatacagtctcaatcatcttggtaaagagattcacatgtgtatggaggggtattgcagtgcttatatatattggtatttgaagcgcttttatggtttgatgggcgatacggacaaacggagtccgacgagtgaaggagaaatcacaaagaatggttatattatggcccattatgctcaatatgcaacagaaacaactcgtattaaggtagttacaaataatgaagaagtctgtgctactgcttatttggatgaaaagaccggtgaagtgactatcgtattattgaatctgaatggtgcttctcaatggctggaaataccattagcaggaataaaaaaagcaagtgccgttgaaacgaacgaaacaaaaaatatggaagtgatcgatactggtttgatggaatctgctgaaggtataacggtgttgttatctgctaacagtataacttcagtcagattgacattttaatgataataataactagttggaatatgatgaatttgttaaatacgaaaagtaagctatcatacctactttttctcggaatagtatgctgtgcatgtattcttggttcctgtaaagatgacgatgtcattgatcctgacgctccttccgtaccgaaacccggtacggctgtcgagaatattaatactaatgtcaaggcattacgtaagcttattgaggccaaacaacaggacctggctgtaaagacatacaatccggtgaataatggtgcgagttatacgattgagttgtcggatggtacaagcttcagtatgtatgctcagatagcagcattggaaggcggaggagaggatgtagtttattctccaaaagtaggtgccaaagtagaacatgatgaatattattggactcttgatgatgcctggctaacgtttgagaatgatgaaaaagtcaaggtgttggatgaaaacaatacagttgcaccgatagtggatatcaacactgacggctattggattgtaaaatacggagctaagtctcgtacccttgacaaggcggtgagcggcaaacttaccagtcagtttaaacaagtgagtactattggtgacgaatctgtcagtttcacttttaccgaccggacacctgtcatcgaactgaatctttttaaaggagacaatcccgaaattcccccggtaacgggggcgttacgccgtcctatttctcctgaacaaccggcatggtttgttcatatcgattcatggaattatgccgatcctcagaaaatcatagatcttatccctgctgatattcgtccgtttaccatttttaacatctcgttgtctgtaagtcatgatgaggctactgggatctataatgtaagcgagtatggttatgagatagcaaagtcgtggttgaggacgtgtgctgaaaataatgtgtgggcgatggtgcagccttcaagcggcggttttagtcattttaaggatgtcagcttatatagtcaatttgaaagtgacgataaggttcgggtatatgatgagtttttcagagaatatcccaactttcttggtttcaattattgcgagcagttttgggggtatgatgaccagttctctgtatcgtggttacaacgagtggctcactggaatcaacttttgaaacttactcataaatatggaggatatttggtagttagtttctgtggtaatacttggtcggctaatattaatcctattgctcttgtgaagcgtaattctgattttgcccaaactgccaagttgtactctgaaaatttcattatgtgtgaaaaatacaccacgcaaagtggcttcttcaatgtcgaaggaatttgtttaggcacgtggctctccggttttgcaggtcagtacggcatccgtttcgaccaatgcggctggacagaggagaaaggacagaatggcgataaggatttcccgccggctgccggtgcgctgcctattatagagcatgtgatgctgacaggtcagactgttattgacggacctgaacttatatggcagcaatgttttaaggagacgaatgcagtcagtgtaggtgatggttatcagagccgtaattgggaatgttttccgcaatttgtcaatatcaatatagatatgttccgtaagattattgataaaacaattcgtattccttcccggaaagaagttattgaccgcacgaaagtggtgattcttcaagatgtctattccggtgatgataatgctaaatacagcagcccgaagaatttgcatgaagggctttaccttcgcgatgatgatggtaatctttgggataatcattgttactttaagaaaacgggccgttatcctacgattcctgttgcgttcgaattgtgtgacgatgtagctaattcattccagtataaaatcaaccaatcaactttcgaaggatcttggagcgatgtaaatactaaagttggaaaattcaaccgttggttcccgcaagagtatacgggagaactttatgcaggacgtatagaaaatggttgggtggtttataacggacttgccggaatacggaatgctgcaattccgtttaaatacaatacatgtgacaagatggaattggcttactccaaatatactgtaagtgttataaaagaatatgccaataagctcaccttctacatgaataactatgaccctagtggttcgagcaagacggaggtaatcaagatatatggatgtacatccaaaccaactcattctgtgtcttccagagccaatggtactgcacaagtttccgagaattggaaagaagatgtatatacgctgactgtcactcataacggaccattggatttgacggtcaattgctcaggaaaagccaccgatcgtttaactgtatctactgcagcatctatccagattcccgcttctccacaaatttatcagggcgcttatcagtatgaggctgaatgctttgattttaagaatgtgactaagagagtgacaaaaggagattcggagccgatacgtaactacacagcacagggatatataaacttcggtactagttctgcagctgccgtacgtgatgctgttactgcactggaagatggtgtatatacaatccgtattcgctatcgtgctccgtcggctacagtcaataccgtagatatgtatataaacaataccaaagtaggtaccccggagtttgcacaaactgataatgacaatactgtatggaatacagccttaatgtcggtttccttacgaaaaggggcaaatacgtttgaattgaaagccaattcatcaggtgccggtgacttgtatctcgacaacattgttatcgaaagaaaataagaattctcttaaattcgattatccgcattttacaagtagtatcttgcggataattgtttttaggacagtatgtaactagaaaataatgaagaacatgtttttgagtcggataataattatatttctattcttatgtgtatctgttttgaatgctgcggaaccatttgtcacttttatatcagcggatgccaagttacctttggttacaccacaaaacagatcgttctctatttggtgtgatgatgcagaacatcgtggggtgctgttagcggtgcgtaatttacaaacggattttgaaaaagtgactactgtaaaacccgaattatcgaatattgcgggaaaagaagtgcgtattatcataggttcgtttgacaaaagcccacttatacgtcaattagtaaaaacaggaaaactggatggtaaagaattgagaggtaagaatgaaaaatatataatcaccactcttcatgctcctttggaaggtttacagggagatgtgttgctgattgctggaagtgataagcgtggaacgatttatggtatttatgaattgtcaaaacaaataggtatttctccttggtactggtggcttgatgttccgccggtaaggcatcaggctgtttatattaaagaaggtgtttatactgatggtgaaccggctgtaaaataccgtggcattttcattaatgatgaatggccttgtatgggaggttggacaactgaaaagttcggaggatttaacagtaagatgtatgtgcatgtctacgaacttctcctccgtttgaaagctaattttctatggccggccatgtggagtgcagcattttatgcagatgatccgatgaatagtcctttagctgatgaaatggggattataatcgggacttcccatcacgaaccgatggcacgtaatcatcaggaatatgcccgtaatcgtaagttgtatggtgagtggaactatcagaggaataaagagggagtagaacgttttttccgtgagggtatcaagcgaatgaatggaaaggaagaagtaattactatcgctatgcgtggtgacggtgatgctccgatgggacccgatacagatacgcatctattggaggaaatcgtaaaaggacagcgtaaaataatagcagatgtaacaggtaaacctgcttgtaagactccacaattgtgggcactttatagtgaagtgctggaatattatgataagggaatgaaaatacctgatgatgtcatgattttgctttgtgatgataattgggggaatgtacgtcgtttaccagatttaaaggataaacggcatcctggtggatatggtatgtattatcatgtagatttacatggagcaccacgtgcctatcaatggctgaatatgacacagatccagcatatgtgggaacaattatatttgacttattcttatggtgtggataaaatgtggattctaaatgtgggtgacttgaaaccgaatgaatttcctgttgattttttcttgaatatggcatggaatcctggacaccttacggctgataatttacaggaatatacttgtagtttctgtaaacaacagtttggggataactatgcagtagaagccgctcgcatcttaaatctgtattgtaaatatgctgctcgcgtaactgcagaaatgttggatagccaaacttataatctttccagtggagaatttaaggctgtaacagatgaatttcttgctttggaggcgcatgcctatcgtcagtttatgactttaccggaagaattgaaggatacatataaagaactcattctttttcctgttcaggccatggcaaacctttatgagatgtattatgcggttgctatgaatcataagttagcatctgcgggcgatccacgtgccaatgaatgggcagatagagtggagtattgtttcaggtatgatgcggaactttgctatgactataataacaatatagctgatggtaaatggaatcatttaatggatcagacgcacatcggttatacaagctgggatgagcctaaaggaggaaatataatgcccgaaatcataagagtggatgtctctgcatataagccgggaggatatgagtataaggagaaaggcggggtggtagtaatggaagcggaacgttttgcagaatgtacacaagggaataagacggagtggacagttattcctgacttgggacgtactctttctggtttgtcgttgatgccctatacgcaacctgtaacaggagcttcattgacatatcgcatgaagcttaattcagagatgaaaaatatacgtgtaagattaatcttggatagtactttgccttttataaaaggagggcatagttatgctatcagtttggatggtggtaaagaacaaatagtaaattacaattcagagatgacttgggctaattgttatacgaagatgtatcccgccggtgctgcgcggttgatagagtcggtggtggatttttccaatgttaatctgaaagaaggaatacatgcattaattattcgtccgttaagccctgctattgtattgcataaaattataattgattgtggtagtgatgaagtcagtcgattgaatcttcaggaaagtccttatcgcaaggttacgcattaattaatatttatgatatagatacgcaaatgaagaagattattgtcttatgttgtttattatgtgcaggcatatttgcctttgcacaagacccgaatttccatatttatctttgtctgggacaatccaatatggaagggaatgcaaagatcgaggcccaggatacgtgcaatgtcaatgaacgttttctgatgatggcagctgttgattgtccgtctttgggacgcgtcaaaggacagtggtataaggctgttcctccgttggtacgttgccatacagggttaacaccggccgattatttcggacgtacgttagtggaaaggctgcctgataatattaaggtaggtgtcatcaatgtagctgtaggtggttgcaggattgaactgtttgatgaggagaattgcgaagagcatattgcctctcaaccggaatggctgaaaaataccgcgaaagcgtatagtaataatccttaccgtagactaaaagaattggctgtagaagcacagaaagtcggtgtgattaaaggtatcctcttgcatcaaggcgagtctaataccggtgataaagagtggcctcaaaaagtaaagagagtctatgagaatctgttgagggatttgaatcttcaggcaaaggatgttcccttactggcgggagaagtggtgcatgccgaccagaatggcagatgtgcaagcatgaatgagataatcaatacgctgccgcaagcgattccgactgcgtacgtgattccttcttcgggctgtcctgccgcagaagataatttgcatttcacggcagaaggatacagaaaattgggagtgcggtatgccgagaaacgactctttttgttggagaaagaaccaaactccggaattactaccgaaccggcatccactaatattccgggatatgactatccccgggtggataaagaggggcgtgctcattttcgtttttatgctccgcaggctagcaagctacaagtggattgttgcggaaagaagtatgatatgtggaaagatgccggaggactctggacggcaacgaccgaccctttacctgtaggattccattattatttcctgatagcagacggagtgtcggtaacagatccttccagctacacgttcttcggttgttgccgtgtggcaagtggtattgaaatccctgaaggtgaagaggggaattattatcgtcctcaacaagtacctcacgggcaagttcgttcctgtacgtattattcggaaacacaaaaagagtttcgtcggtgtatggtatatacgccggcagagtatgaaacttatccgaagaagcgttatccggtactatatttgcagcatggtatgggagaagatgaaaccggctggagtacacaaggacgtatgaatcatattatggataatttgattgcatccggcaagtgcgtgccgatgttggtagtgatggatagcggagatgtggaagctccgttccggccgcgtctcggaaaggatataaatgaagagcgggctctgtatggcgcaactttttatgatgttatcctgaaagacttgatacctatgatagatcgtacgttccgcaccaagaccgaccgcgaacatcgtgcaatggcaggattgtcgtggggaggacaccagactttcaatactacactgccccaccttgacaagttctcttatatagggagttttagcggagcaattttcggattggatatgaaaacttgttttaacggagtattttccgatgcggacgggttcaataaaagagtgaattatttctttcttggttgtggtacggaagaacaaatgggaacaaagaaaatggtagaatcactctgcgaattgggaatcaaagtcgattattatgaatcaaaaggtacgggacatgaatggttgacttggagacgttgcctgaaagagtttcttccaaacctgtttaaacattaaataatatgaatatgaaacttaaacaagctgcggcagtattgctgtttttagggatattgccatatcatttatctgcgcaaaatccgattgtacaaacttgctatacttcagatcctgcccctatggtgcatgatggcacattgtatgtctatacgggacatgatgaagataaggctgattttttctggatgcaggaatggcgcgtgtattctaccaaagatatggtgaactggactgaccatggttctcctcttgctattgaatcatttgcttgggcggacgaccgtgcctgggcggcacagtgcatcgagcgtaatggcaaattttattggtatgtctgtttgcactctaaactgaccaataccatggcgattggtgtggcagtcggtgatacgcctgtcggtccttttaaggatgccatcggtaaaccccttcatgacgggagctgggattatatagatcctaccgtatatatagatgatgacggtcgtgcttatctgtattggggaaatccgaatatctattatgcagaattgaatgaagatatgatttctttgaaaggtgaagtgggcaaactggaacagactgttgagagctttggtgcacccaatccggaaaagcgtgtcaaaggtgttaagtataaagatacttatacagaaggtccatggcttcataaacgggaaggaaaatactatcttctttatgctgccggaggtgtacccgaacatattgcctattccatgagtgacggacctcttggcccgtggaagtatatgggagaaatcatgcctttacaagatacgggctcgtttactaaccattgtggagtgatagactataaaggcaattcttatttcttctatcatacgggtaagttgccgggtggtggaggcttcgggcgaagtgcggcggtggagcaatttaagtataacgctgacagcactttcccgattattaatgctacccgggaaggggtgtcaccagtaggtacgctcaatccttacgaaagggtggaagctgaaacaatcgctttttctgaaggtgtgaagtccgaaccaaatgtgaaaaccggtatatatatatctgaaattcataatggagattatataaaggtacgtgaagtggatttcggcaataaatcccccaaacggttcactgctaccgttgccagtgcccttcgtggcgggacacttgaagtacgtacagacagtataagcggaccattaattgcggaactgactattccttcaacgggaggttgggaatgctggaaaacattgcaggctgatattgtaaaaccggtcacaggaatacaagatatttattttgtattcaaaggacgtaaaggctgcaaactgtttaactttgattggtacaagtttaacagataaacatgctagagagcagttgggttactcttcttttttgctcaactgctctttcatatacattgaaggcggcattccatacaattctttgaatgttgtcgagaaattattaggatcagtgaatcctgttaacatggctatctcggatatggtatgctgtttttcggacaataaacgagcggcttcttttaaacgtatattacgtataaagtcacgggttgtctggttggtgagctccttgagtttcctgtgaagatgtacgcggctgatacctacttcggtggtgattgtctctattgtcaagttagggttaccgatgttttcattgatcactttcataatacgttccatcaatttctcatcgggtgatttcacttccagtttctgaaccttgttctccagattttgctggcctgtaaatactttgcgtaactgctgccgtgtattaatcagattttctaccgtcttttgtagaatttcgatattgaatggcttcatgatataggcgtcggctcctgtattcagaccttcaaggttgtcttcttccctcgttttcgcagtaagcaaaatgactgggatatggttgaggtttacattctgcttgatcttccggcataaggtaagtccgtccatttcgggcatcatgatgtcactaatgactaaatccggagtctttttaaatatttgctctaatgcttctttaccattacggctttccatgatatgaaatttgtccccaaactccttcgctatataatttcggatttcttcgtcgtcttctacaattaatacgcgatatttagtttttaccctgactttcttttcttcctcattttctataatgggagagatgacaggaacagttggtacggctactgttaccttttgctcattgttgtcaacttcttcaggtcgtagatgcttgttacccaacggtaatcggataataaaacggcaacccagttgttctttattattttctacatagataattccatgatgtaattccactaatgaacgagtaagatgtaatcctattcctgttccgcctttcggattctgttggctgttacggatctgatagaaacgttcgaagatatgttctttttcctgttcatcgatgcctgttccggtatccgcgataattatttcggcatattgtttcaagggatcgggcagtgtattgtcttctcccgtacggatggtaatatctatgtttcctttttcaggagtaaacttgaaggcattagacagaatattcaggataatcttatcaaaattacctgtgtctacccatacattcagttcccggagcgtactgtgaagttgtagccggatattttttgtatttgcctgttgaccgaacgttgtacataaatcctctataaaaggaataatattggtctcccggaacatcaggaacatttgccctttatcaattttccgaatatccattagttgattaacaagattcagaatacgttccgcatttctgtagataatatgatatattttcaggcgttcattgttctcctcattcttaatcagtttctgtagagggctgatgattagagacatcggagtgcgtatctcatgagagatgttgataaagaactgcaattttgcttcattgatttgttcggcatggatatgttgcagcatttcctgatgcattctgtaccgatgtctgatctgaagaataatgataaatataatggtcagtaataataaggagtagataactttggcccaccatgaagcataccatgcaggagatataaagatggtaatttcttttatatttgaatacacggtgttgtcttttgctctgattttaaagttataggtaccgggtttcagattgctgaatgagatacggtttacacctttgggcaaactaatccatttttcatcgttgatagaataaaggtagttgatgtgttcgggggcatttaattccagagtggcaaactcgatactgaacacattgtctttatgggatagataaaactcttttgcgttgaatacagggcagttgataatattgtgaataccggatttcattccttttctaaccggattgttatgcaggaaaaagtcggtaatccggatattccatgtttttgccggattgataatgtcttgcggattgaaataggtgatgccattcattccgccaaaccagataataccttgtttatctttgaaggaggcattcttgtagaactcatttccctgtaatccgtcgctgacataataattgataaatttgttgtttttcttttggaattgggaaattccggcattggtgcttatccaaagaaaatcttttccatctccttgtatggcatatattgtattactgggcaatccgtctgcagtagtataagtggttagttctttcgtttttttattccaaccggataatccttcggaactgcccaaccagacaactccgtcggcatcttcaaagattgaataaataacattttgtgagagtatcttatgactttgaaaatcaggactgtcaaggtctatacagttgacgccgtcataagttccgacatacagtttattatcatcggaatagtgcaggcaacctatccattcgttgattagagatgtctgagattgtacggatgtaaattctttcgttttcaggtcatagtagaacaaaccgaatcccattgtcgcaatccaaagacgcttgtttttatcttctacgaaatcatatacacgttgtatatagttgttgttcttatctaccagtttgtattggtaatcgcatgatcctgtctgtttgttcaattttcccataccgttgataaaggagccgacccaaatgttgtactcggaatcttcatatagttttataactgttgaaggcacagaattagggtgattagtatgcgagaaatgtttagccggttctaacttttctgtcagggcataaattccgtcattgtctgttccaacccataacataccgttgttgtctttgcagaatgaggttatacaactggaaccgatcatgtttttatccatggatttatgtcctatatacttgaaactgtttgttcgggcaggtatctgcatgactcctttctgataaacagccaaccataagttaccggaattgtcttttaggatagaatgtatttttgaattttttgaatcaaaatagttgttgtcaaaattgtattcggagatttcattagtttggttattgtagacactcatacctttaccatcagttccgatatataattcattttgcggtccggaatagaggaaacagataggaagttctctcttttctttaaaatcaataggtataaaggagtcttgtcttttgttatagacgaatagtccttttctcatacttcctacataaatattcccacgtgaatcttcacatatacttttgacatatccgttgtctttagataaatataaagtaagttggttattagaatcaagacgatatactccttcttcgtcttttgctatccagacattctgtttcttgtcttcaatcataaatcctgttgatgtcatggggatatcaattttttgaacagtcaacaggtaatctttgatattcaacctgcacaacatatttccggatacccatatttctccatttctcctttcgataaaggaaacaatattgctttcaaatatttctccattgtcttcccttattgcaagtggggtaaaattgtctgtagccggatcatacatttgaattcccatatatgtaccgataaacaaatgacctttgctgtcctcaaaaacagtacgaacaaaattgtgggctaacgaatgttcattattgggctcatgtttgtatatggtaaatttagcaccgtcataacggttcagaccatcttctgttgcaatccaaatgaaaccgttccggtcttgatatatttgattaatcagactactggagagttctttgtcagtagtgaataacttaggagattgcccgttgcataacaaagaaaacaataataatagaaaagtgaatacatttttcatagttatagatcgttgtttgttgtacaaagaaaactaaaaacctaaatataacctaataaaaaatgaatattttcattaggctccgggagtacaatcggatgttgtaacatcgtttgtgaaaaatgtaacatgagaaaagattaacctctccttatgtattattgttttcctttcattgtatttacaatatagcttttaccggcttttgtttcgatgtcatattcgtaaaccttctgcagtttgggagactgcgcacttactcctttggctacaagaggttgcttgataggagtggtggcgaataatctatttgagcactctttcccgtttacttgttttaagcctttccctttcaggggaacataagaccggatgcggagcgtaccgcctatattcgaccggatgatcgctttatttaacacattgtttttccagtccatatcaacagtaaagtttccacgtgccaccagccccttcacacttccttcttcccatgcatcaggcaatgccggcaataaatgtacggcaccgtcatgactttggagcaacatttccgctactccggctgtataaccgaaattaccgtcaatctggaaaggcggatgggcatccagcatattgggataggtacgcccgttcggatattctttagccaagttttcgttgggcaatagttgaatcatatttttaatgatttggaaggcatggtttccatccagcatacgtgcccagaaattgactttccagccgatactccaaccggtagctttatcaccgcgttgaagcaatgtgtttcttgctgcctggaataactcgggatttgagtatggagaaatttgattactcggatatagcccgtacaaatgtgaaatatgacggtgctcgtctttgggattgtcaacatcttcaagccattcttgtagttggttatgttttcctatttgcataggtggcaacttctctagtgtttgtttgagggagtcttggaaagagggggcttcacctgcgatgtatgaagccaataaggtattatgcagtgcatcaaaggcaatctgattgtccattgtgcaaccggccgtgatgggaccgtgttccggcgacacagaaggcgacactaccaaccatttatacactggatgttctaccaagaaatccatgtagaactgcgctgttcctttcaggatgggataatactctttcaggaactctttatttcctgtaaagaggtaatgttgccagatatgttgagctaaccatgcgccgccgctaggccacatgccggctgctgcaaaatcgactacaccacagattctccataagtcagtgttatgatgtgccacccatccccgacaatcatacatggttcgggctgtttctgctcctgtgacggataaatctttcaacatagagaataacggactatgtgtttcacttaaattagtgacttctgccggccaatagttcatttctgtattgatattgatggtgtatttgctatcccagggtgcatgagtactgttattccatataccttgcagattagccggttgcccacccggttgcgaagaagaaatcagcagataacgtccataatggaaaagtagagctgccattgccatgtcttccccatttccgaagttttcaattcgtttgggagtctccagttgggaagctttgcctgccggtaatgtaaggcgtacacggtcaaattgttttttataataagcgatatggcttttgagagctttttcgtaaggtatttgcattgctcttttcagatattcgctggttcggtgggattcatcggcgctgacatcctggtagtttacgtagttggttgctgccgatatataaagggtggcttctgttccttcatttatttggagcgtatttcctgccgggcggagagtgccattcgtttttacctggatttgacattctgcccgtagtgcggctttcaaaccttcctgctctttcccttgacaggtgacggtcagctgatcgttctgaacattcaccttatgtactagaggacagttatatgcaatagtaaagttcagtgcgtttgctttacttgctttgatatgcataataatgacattatcagtaaatgaagcaaaagtggtgcgggtataagtgacgtcatccacttgataacgggtagttgtcgttgcattctccagattcagatcgcggtaaaagccggatccgttttggtgttccggaaattccaggtaaagactacctaatgtcagatagctcattccgtgttgctgggttaagaagttggcgtcaatgagtctttgcgcttccttgtttctcccttcaaaaatcagtttgcgtacaaccggtagcacatgtacggcattcgggttattattattgtatggagaacctgcccaaaatgtttcttcgttgagttgtaattcttcgcgttcgattccgccatataccatggctccaagacgggagttaccaatagggagagcttccgaccaattttgtgcaggttgactataccacagtttcaggtcctgtcctgaaacaaggttgcttattaataggaataatacaaaaaaagtgtttctgttcatattatatggatttgtagcaaaggtagctcatttcccaatacaaaaggcaaaaaactgtttctgaaatctaccttggaagtaacttctttccatattaatgttactaatatatatggtgtatgttccacaggataaaataataactgccggcttctttttacaagcaccggcagttattatttaagcaactagcagatatactgatctatgttactttttagcaactaaaactatattattgatatctacttttttgttttttcccatcccaatggaaactttggtaatagaacttggatcaattgcaattttaccggctttttcatctttaaaagcactgaattgcaccttcttcttgccttgggtataaaatcccatagaaacttttaccgtttcaccatcttgggtatattctatttttaatgaacagatggcatttgtggcattttcatctaatttttcgaagttggtcgcttcaaagtttattccggtgtaattagtgtaatcattttcaggaaataccaagtttccataaccggtggaaattaaggtctgcccttctactgtcagtttattattggcttcgcattgactgacttcgatagtcttgtctacttgtgcattgacacttaagattcccagacatgcaactaatgctgctactaaatactttttcatgttattttcttttagaggttaatagctgatttattttctattggcaaagttaggatatcttttcggagagataaaaaatctgtgtttcaatagtttttgtatatgtttcattcttcttttggtgcaaaggggactaaatttaaaaacaaatgaaacgaattaaatagtctgattttgaaaagaattactttctttgcataaagaaaggactgtttgctatgaaaagactattactgttgatgattgtattttttgggggaattgtacaggtggtcgccgagaatacattgttctatgattccaaacaattaacttgcgatctgattacttccatttgccaggataaagatgggtttatctggatcgggacagattatggccttaataaattcaatggcatacaatttactcattattataataatcccaaggatagcacctcgttatccgataactctgtaaaagccttgatgctcgataatgaaggcacgttatgggtgggaggtattggcggattacaatattatgttccggaagaaaatgcatttcggacaattaagtttgaagaaagctcatctttccatatcatgtgtatcactcaattgcgttcgggcgaaatatgggttggatcttccggaagaggaatattccgtattcggaaagatacaggaacaggtgagcaaatgacagatattcctgatgtatccgaacatgctcattatggagtcatatatgaagaccgtcatgggagcatctggattggagtaaacggtaccggtttacttcgatatgatccttctacacgaacgagtaagatatacacacgggcagttttagatggcggttctacaatttccggaatggccgaggaccattcgggaaattttctcctttccacgggtactactgcttattattatgatagagagaatgaccgctttaccaaaatagaacataatgaatcgtggctgccggcacgttccatactcgtaagtcaaaaagggacacgttatttggcaacctttggcaaaggactgaaggttattcaacccgatttgaaagaactccgttccgaggtgatcactctcccttttattgatgtcaataatgctaaaatacgtgctatttatgaagatcataaccaaaacttatggataggatgttatcatagaggaatggttatggtgtctaaagaatctacacctttccatttttggagtgttcctacccgtgaatatccgcaggctggtgtgataactgccttgtataaagatgatgatggacatatcgttagcggtgtggaaggcgaaggagtgtttaaaattacttcggaaggaaatataaccgatcatttgttttcaggtaaaacggtttcatccatctataaggattatagtggtaatttgtggtttggaggctattattccgggctttatatgcaggatgccaaagggaacgtacgttttatgttaccggaaattaaattgaaggatataaagaagatcacaggtgatgataaagggaacctatatctttctttattcggttccggattcatacgatatcacctgcccactcaaacagtcacggaatatcaaagttcctccggtgggttaaggaacaattggatttatactctacttcttgattcccgggaaagattgtggataggccactgtaatggagtggattatttcgatcctgtaacggaaaaatttacccctgtattgagtcaatcgttgggtaatttcatcacttactcattattggaagacgtacgtggaaatatttgggcgggaacgaataagggacttatgtgctatcatcccggaacaaaagaatttcattactatgatgaagaagacggactttctaataattttgtatatgggttggcagaagatgagagggggaatatctggtgtagtaccctgaaaggcattaacctgataaaagtcgcagagaataagattgcttcctattattccgaacgtggattggtggataatgagtatactattggtgccagctaccagtcaatgaatggccttatctatttgggaggtgtgaagggaataacgacttttcatccggatagcgtcactgcgcaaaaagggaagtcgactgtgatattatccaatctttatttgggaggagaagcagtgaccgctaaaagtaaatccggtggaaaacccattttggacacttttgtaacacgtgccgacaaaatcagcctggcttatgaagacaacacgtttacgcttgagttttccacattggattatcgtaattctggaaatattttctatgaatatcgtatcagagagtatgaaaagaactggacctctactcaattgggaatcaatcagattacatacaatcatttaaattccggtaagtatacatttgaaatacgtgcctgtgagaacgggcagtatacccctgtgaaggtgatacggattgatattgcggcaccgtggtggcgttcgtctctggcttatgtctgctatgcgttgatattgcttgctgttgcattccagatttatttgagtgttcgtcgccggcaccagaaagaaatgaatgaagagagaatcaaactttttatcaatctctcgcatgagattcgctctccaatgactttgattgtgagtccgttggagaatttgttaaagagagactatgatgccgatacgatgaagatgctgcgtctgatgcagaagaatgcgaatcgtattattaatctgatgaatcagttgcttgatatgcgtaaaattgaaaaagggcaattgaatattcattgcgttgaaacggacatggtggattatatcaaagaattaatctctttatttacttatcaggcggagaaaaggaacataaacttgtgttttgattatgaacaggaggagcttccggcgtggattgatcctaataattttgataaagtattggtaaacctgctgtcgaatgcttttaaatatacgccggatggaggtgaaataaaaatcagcctgcgcgagaaggtgaatgaacttactgttggagatttgcagcattttattgagattgaagtgattgacagcggatccggcattgacgccaataaactggaaaagatattcgaacgtttttatcaggcaccttccaatggtttcaatggaagtatcggttttggtataggactgaatctgtgccggatgatagttaaattgcatcacggcactatcaatgcttgtaaccggcaagatgcacaaggaagtcgtttcattattcatattccttatgggaaagatcatttgaagaaatccgaatgggtggatgcggaaaacaaaactacctcaagagtcccttctgtcttggggctttctcaagaaagtgaagaagaaacggctaagacaagaaaccataaagcgaattataggattgtgatcgtagatgacgacgacgagattcttcgtttcctggaggcggaattgagcttgcaatacaaggtatacatttgccgtaacgggaaagagggtttgcaaaccattctgaaacaacaaccggatcttataatttctgatgtcgtgatgcctgaaatggatggtatctcacttttgaaaacgattcgcaacaatccgaatgtgagtcatataccgtttatcctgttgacttcaaaagcggaatataaagaccgtattgaaggattaagtaaaggtgcggatgcatatttaggaaaaccgtttgtcgttgaagagttgagagtacatatcaagaatctgattgagacaagattgttattgaaaggaaagttctctggtgtcagggatcaggtgggaaagattgaaattgctgaaaataaatccggagatgaacgattgatggaacgggttatgaatgtgatgaataagtttctggatgattcggaattcaatgtagaaatgcttgccagggaagtcggattgagtcgtgtacagcttcatcgtaaaatgaaagatattacaggagtttcaacatctgtctttatccggaatctacggatgaagaaagcggcagcactacttcaggaagggaagctgaatatttcagaaatagcggatgcggtaggctttgatagtcaggctaattttgcgactgtttttaagaagttctatggagtatctccttcggaatatgctgcgtctatcagaaataaaggcgaatgatacaaatttaaaactgcgttatacatataactaactttacgttacattttaccaaacgttttgaaatacaagattgtaattttgtgctggttgagggcaatctaaagaatcgacagatgcaaaagtacaatcttgtattttactcttgactccttttcctatattttaataatgaatgcatgaaaacacaaagttgtatgaacaggcttttatggattactttattggtaatcggtttatctggatgctcggaagagagttcatcgtcagaggaaaatacggaatctggtacgatccaagatggggatcatgctgataatgcaacggttattcaattaaattcttccgatcaatatcagacagtggaagggattggcggcgggatagccaattatgagaattggtattgtcaacaccccaataaaaaagaattgtttgatctgattttcaaagatttggagatttccatgattcgtataggaaactggtacgaaaagaagatatcgggtgagaatcccgatattcttaaacagcaaaaagagataatggatgcagcaactcaaagactggggcgtagcaatttctctgtaatgatgtctaattggctggtagcacccgatttgatagataggccgaaagaaaagggagcgacacttaaaagaaataatgaagggaagtacatgtataaagaatttggtgaatggtgtcgcatgacattaaaagcttatcaggaagcagatatgtcaccggattacttgagcatgatgaatgagccggatggggataacagtgcaggaaccaaaatccgcttaggctacggtatcgacgactcccaaaaagcgaattacgggaaagcattggacgccacttatgaagcattcaaagaggtgtctgaccgtcccaagttaatcggcccggaagtgcttggaattggctatggtacttttagtaactattacagagacttgaatcctgacctattggatgctgctgctttccattgttatcatggtggtaagacttccgattataaagataacgaccgttattcttccgcccatgcttttaaaactgaatttcaaaacatagcccggcaagttggcaacaaatcaattatgatgacggagaactgttcttatcatcctgctgttcccgaagatgctgtgaatattgcacattttatatcaaactccttccgttatgcaaatgccactgtttatttgcactgggcactattatggggatatgcagatgctgatgaattaaaaaaggggggtgacggttgcatcgctgtcgagtggccttggagtagttctcgctggacgacggaaaaaggctatgtggtaaggagtgagttctatgggcttaagcactttacaaagtacgtcaagccgggttggcggcggatcggagtggattatgaactaaaagaggtggaggtagttgcttttcaagaccctgatgaatatcagatagctgtcgttttagtcaattactccgaacaggaggagaaaacggtcaggttgaagaatattggcagtaaggaggtatcctccataaggaaagtaatacagactgatactcaaaaagaaagttggtatcaggagctgaaaaacactgatccatttgtcgaattagtattaccaaaaatgagtgttaccactgtttatttcaaattcaaaacaaattgaaacgtatttaaaaagcgaataaacgtatgtgtaacttgatgttacatttcaaatagtgtagtagaatgtaagttcatacttttgtgtcggacatttgctaaatatgggtgtgaaattataaagcaatattttataaatgtaatatatatgaagaacaattatttttcaagatgtgtgctgctagccggattatgttcggttattatggtttttgcagtcactcctgtttatgcgaccggaggtgcattttctcctcttccacatgctgtctctgaaggagacattactgttaccggtaaagtggttgatgatgccggagaacctttgataggtgttagtattcaagtgaaaggtactagtaaaggtgctactactgatgtgaatggtatttatacactaaatatagcatcaggttctacccttgtattctcatatatcggaatgaagaccattcaacggaaagtgacgaaaggcggtaagctggatatcacgatggagaatgatgagaatatgttggacgaggtggtagctgtaggatacggctctatgaaacgttcggacttgacaggatcggtcgtttccatcaatgccaagtccatagaagaatcaatggcttctaccattgaccaggcgttgcaaggacgtgcggcaggattgcagatgacgcagaattccggtgttccgggtggaggtacatctattcagattcgtggtgtgaattcattaaacagtaccaatgaacctatttatgtagtagacggagttattatctccggtgaaacaggctcgaatacaagtaatgctatggcaggtattaatccagctgatattgaaagcattgagatcttgaaagatgcttcggcaactgccatttatggtgcacaggcggctaatggggtcatattgattacgatgaaagctggtgtaacaggcaagcctcgaattaacttccaagcctctgtgggaaatcaggaaataccgaaaacaatcgacatgatgaatttgcgtgactatgcccgtcactataatgaactatatgctcttataaatgccagcagggtgaaagatgcgtttagtcatcctgaaactttaggtgacggtactaactggcaggatgagatattccgcaatgctctgttgcagaactataacctgtcaattcgtggcggtacaaaaacggtcagctataatctgtccggcggatatttggggcaggacggtatttgcatcggttcggattttgagcgttacaccttccgtatgggaacagagatacaggttactcctaaggttcgtttcggaggtacggtgaatgtttcttataccaagcaaggtacaggcatggctagctggtctatcattcccaatgcactttatcaggcaccggatgttcccgtacgtgataagaatggtaacttttccggaccggaagaggacgaccagcagaatttaagcaattacagtaatccggtggcgttggcggcattaacacagcgtaataatgaaaagggaggtgctcgtgccaatcttttcatgaaaatcaatccatggaaatggctgacttaccgtactgattttacggcagatggcaatatcgataattatcaatatttccttccccaatatgaattgggatactcaaagaatccttatcctactaatgaacactccaaaaactacgggctttactggggatggaagaatgtagtgacgatggagaagacgttcaaacgtaagcacaagacgagtttgatgttaggacatgagatgacttccagaagttcagattatcttcagggaaaacgtacacatggtgataatctgctgacagacttggatgcgggtgatgctgcgtatgccaccaatagtggaagggcaagcaagacaacatacctctcttatttcagtcgtctgttttatagttacgacaaccgttaccagttaacggctacggtacggcgcgacggaacatcccgttttgccaaaggaaatcagtgggggacattcccatcagtagctgtggcatggcgtctttccgaagagtcattctggcgtccgctgaaagatgtggttaataacttcaagttgcgtttgagttatggtgaagtcggtaattccaatgtcagtgcatttgcttaccaacggatgggaacgtatgtgcagtctatctgggggacgagtttgcagaccgccaatattgctaattccgatttgacatgggagagtacccgttcctggaatgcaggtatcgacctgaacttttttaataaccgcgtcgagtttattctggatgcatatatcaaaaagacaagaaacctcttgttgcaacaagattatccgggatatatgggaactacgggcaatggtgctgcaacagctcaatgggcgaatataggctccatggagaataaaggttttgaatttacattgaacacggtaaatatatccaatagggattttcagtggcgtacaaatgttacattcagtttgaaccgtaacaaggtagcaagtatgaatacagagaatgcctttatcgacaagacttatcaaaatagtggtcagacggaagtgattacccgcactgcagtcggaaagcctgtcagccagttctatggctataaggcaatcggccgcatcaatagcgcttccgattatttgatagataatggtgatggaactagcacggtaaagattgctactccagtattgcgggtaggtgaacaggtggttaactcgggtacggataaaggtagccttatcaaacaaatttatattggcgattatatttttgaggatctgaataatgacggagtgattgacgaaaaagatcagacattcttgggaagtccgttgcctaaatttacctatggcattaataatacctttaattataagaatttcgatttgactatattcttatatggttcgtatggaaacaaagcgatgaactatttgtcccgtcgtattactaaccccaattcgagtggtaatgtacacgcgtccgttgccaaccatgcccgtttgggataccttgatggaaattcggataataccgatgtctggaatatgtatatattgcccggctctaacggtttgtgccgtatgtctgttaatgatgccaatgataacgaccgcatcagtagccgttatgtggaggatgcttctttcttgcgtatacagaatatcgctttgggatatacgttaccgaagaattggttgaaaaaactgaagatagagaatgcgcgcatttatgcgaatattaaaaatgtatatacattcacaggctatgacggttacgatccggagattggctctacacaggcgcaatattcttattccggtcagagtatgctgatgtacggagtggatacgggacgttgtccttctccccgtatttatacatttggtattgatttaaccttttaaatagaaaacttccatgaaaaagaatattatattatcagtggtttgtggaatggttgcgatggcaagcctcacttcctgcaatgacttcttgcaagtaagtgccaccaaccaaaaagaaatggacaaatcctttactacttatgacgagctgcgtttggcaacagcttatctttatatgaaaccttggtttggttttcacagtacccgtctgtttgcgatgggagatgcacgcggaaacaatatctatggtgacaacaacaacgagacaggttatgctccttattgcctctttaccgacaaacccaatacacccggacttgccgatgcgtggaattcactttacattgttgttacgcaggcagactacatcattaacgattatgcaccacagggacgccaacatttcagtgaagcacaagcgaatgcttgcgagggagaagcacgtttcatgcgggcggcggcttattactatttggcttcctactggcacgatgtgcccattatggagaatccaattgctcatacggaagctttcaatatggctcccacacgcttcgaggatgtgattcgctacggtatccgcgacttggagtacgctgcggagtggttgccgcttgccgacgcggacggtcgtgtgactcgctattcggctttgggactactggcacgctattatgtaacgctggcagcgtatgcgcgtggcggacactgtacacaggctactatggattattatgaagccagcggttctcacgacttggctgacattctttatgatttggccaaggaggctgccggagaagtgattcttgctcagaacagatatggattgatggaagaatatgaagaaatcttccgggtacagaacaataattgcaaagaggtattgtttgctttgcaaccgctgcaaggtgtcgactcctacggaatgggtaacagcaacggaagcggtttgtgctcttacacagaattgctgaacggtttgagtgcctataactcctcttatgtatcttacgactgcctgcgtatgctgattaattccggcggacgttcccgtctgcgtggtaatgtgctttgtccgggagagttctatgactatatcggtacacatttggtggatggtggttgggctgccggatataaaggcggacagaaagctgccggattagaaacgaacagaaaagttgccttcaagaaacaggtagtgggtagtgctgaagacacgaataatatcgctattgccgggaactccggtttctgcacaccgatgttgcgccttgcagaagtgtacttgttgtatgtggaggcttgcatgggcaccagtgatgagctgaccgaccgggatgccttgaaatattacgacgatgtccggaaacgcggctacaagatggagatagagagtggcgaactgacctactatgacaccaactatctcacccgtaatgatttgttgagagagtttcgtgtagagttctttatggaaggcctttggtggcctacgctggtacgccgttcgctttacgacacaaagtgggtgaccgactttatcaataacgagttggttattatgaccgaaggtgatgaaggagaacaggtgcgcagtgacgaatgggacagcaacagatggtatgcttactattatacgataaacaagaacactcttcaggcggcattcagttctgacagtccccgccagtccgacggagccaaactggcggtacgagctactcatactccgttggcggaaggagattacgtacattcgaatacctctgatgataatgtatgggcattttcttatccggaagtggaaagtacccgtgacccgttattaaatacagcacctgttgcttatgattttaacaaataagatgactactatgaagataacagataagatattaacgaatttgtgtttgagcactttattgctgttctcgttgtttagcgtattttcttgttctgacgacgacgatgatgtccgcatatacagtgtgtggagcaatatgcttggtgaagaagccagacagataacctctgtttataccggaacctggattcgggtggacggtagtggctttagtggtttgcaagctatttattgcaacggtttgcaggtgacggaatacaactctacttacatgagtgactcccatctcacgtttaaagtaccctccagtgttccgatggcacatgagatagaagatgaatcagtcaaaaataccctcagggtggtgacttcccacggtgaaggagtataccgtttcatctttaaagatgtgaacaagatgcccggcattacagacgtgtcatacacgttgccccatccgggcgatcacatcacccttatagggaagtacctcaatggtgcatcagccgtttactttccaggcaatgacggcaatgaagtgcaggttccctatatcgatggcaccggagatatggtagtgtccgaagatggaacgcggataactgtcaaggtgcctgatggagtgggcgaacggagtggttccctccgggtggagatggcagaattgggtgagaactattacactcccaattatatgttctacgacaaagcaatgtttgtgcacgatcatgaaggaaccacagctttgaactatggtgtgtccggaagtgtcatctctccgcagaaatgcgcctattactcaatcaacgcggcagatgcgccgcaagtacccgcaggtgccagagcctatatcttcagtatacccgaaactgctccggccactcttccggtggtgagcgataataattcgcctttcggttatttccgtttcaatacaggaatgcaattacagtatctgatagacaacagcgacggagaatgggccagagaaacggatgcccgcaaggcagctttgcaggcggacatctatatgaatcatgattggagcaccggcgtggtaggctggcgcatgaacaagaatggaggaaagggtaatggtgaaagtgcatggaatgtggcttcgtggactaacaataagccatacgcatttaacggcagttggaagacgcttactttcgagatacataccaagtatgccaacttgggcgaggcgattgatgcttggagtgcgagcggtgtgcactcactgttcactatcctcaacttcgatgtcctgtcggccggattgaccatgaaagagggagcggatttccgtatgttcatcactaacttgcgtttggttccctatgtgactccggaagaataaaatataaacatgaaacagattagatatgaaaacttttaaatctatacaatcgggaataattgcttgcctgataataacctttataatgggattattttcttgcagcgatgacaatgaaacggtagataatttgctgcctcctaccattgtaaaagtatgtgtttgggatgaagacattgaagaatggattattcctggagcagaaagtaaaattcggattggtacccctttgcgtattgagggtactaacatggcgcagacgattgccgtctatatcaatggtgggctcatttctgcttttcatgcagaggacaatgcgatagagcttgttattccggacattcctgtagatgagggagagattaaagaggtgaacgtcaacttgatccgggtagtgaataaagcgggagccgctacttgtacggccaacgattttcaattctttggcaggcaaattactgtgaccggtttttcgctgacagaaaatgacggaagaacgtgggaagccgtgcaagaactgccgataggtggtaagatacgtattgagggtaacggactgaaaacagccaatgaactgtatattaatggtacttctgttgatttggccggtattcctgccgaagaaaagaacgatgccttcctggttgtgactattccggaaactttgcctttcgggaatgctgtcgagaatccggacagccggaataaaatgcgccttgtgacggcttatgatgatcgcacgctggattgtgttattgcgggcaagcaggtagaaatcaaccgaattacggacgcaaatggtaatgccattacggaagccgggcgcaactcggtggtggtcattgaaggaaaatactttgccacttttcaaaaactgtcttttaacaaccaggaaatagagccgacaacgatagaaagcaatcgtatcactttcactgtaccggtagatacggaagattttacagtgggcgacggagaactgactgttgtcaatgcgtatgatgaaattggtgttagccgggaatttactcttttaggttttgtccctagtgtgacggaaatttcatatacgatgcctaaacccggtaatgtgatccggcttacaggtgtcaatctgtacgataaggcgaaagtctttttcccttcttccacaggtgaaaaggaaagtctcgttcagagtgcctcatcggatgcgacttccatggatgtacttgtgccggaaggtgtgggagataaggcaggatatattcgtatagagagcgaaggtgctgatgttgaggtgaaaggaattgtcatgttctacaaacagggagtgttcttgcaggagttcacggatgaagagttgaaactgggtagtccgtcagggagtcctatggcgtataataaatcagcattgtatagcccagataaccgtccggcaaatgatactcatccggtgaatcccgattactttatttactttaagagtagttctgttccggtaagtaccagtaaccatggggcttacttgagattctcgacaaggagtcaattggaaaagctattggagaaaacggatattgagataaccagagaaactctgattaaagatattgcaatgcaggtcgatatgtatatgcctaccccatggataagcggaatgttggcctggcgtgtgaataaagacggaggtggattgaatggaacccgtaatattaatattgctccgtggagagtggacaaaccatttgactttaatggagaatggcatacctttacttatagattcacagacttcatattggatacggcaggtgaatcggaaacaatgacactgggagcctggttgagcaaatatgctataacttatacgtcattgtttactttctctaatggtaatttcatgtataaaaatggtcagactgcagatcctcaatggaattgtgtgaatattacagactttgaaatgggacttgccaatatgcgtttggttccgctagtgccaatagaattataataaaaaggataatatgagaatacgaatgaaaagtttcttacttatgttttgtctgttcgccgcaatagcggcgaacgcaaaagaagagcctattcaacttttccctcggacgtatgggtatttctccagaggagacagcgaaacacagacgattacttatgaccatgcttacggacagtacggctggaaaaatacaaaaaatgtggatctttccgtttataatcatattgttttagagatagaggctacagactctcgtgtggaaatctatgtactttatgaaggggttgaaaagagtacttgtatagggggaatagatgccggaaaaacgaaagccgtttgtgaacttgaacatatagataaggtgcaggcgatttacatagctaaatcaaaggtaggtataaccaagattgtcaagtttgtgctgacagatgaaatagattaagtatttatttgttgaaaaaaacagccctcgctacggagttattctccgcgcgagggctgtttctgtgtataatctatcttgtgttcaggtaatacatcgtgattggtgttttttttattatcagccttgctttcttgtcaagtagcttgtttgcaagctgattaagtaaggaggtataagaagggaagcaggtatagttgcgttgggataccggtattgttccattaaagtaccggtatcattaatttcccacggccgtgacaagatcttcccacggccgtggtaggaactcgtcacggctgtgggaagaagctaccacggccgtgaagaattaagtataccggtatcctgatcgaacaatagttattgaatgatataagtatgccggttgtatgacggatgtttaatggcggcttttcttgaaaggtaagtaaagctggaaggataggagatatgggagagcaaaatcataaaataataggctgacaataaaacttataaaatgttattgtcagcctattgtcagggcttattgtcagcatctaaaggattgaaaatcatttatctaatgaataggaatgacggctgacaataagaactgcaaaatttatatgtaaatacaatcagtgatgtagttattaactcatctctgcattgattggattgagcttttttatctactttctctcttacttttcgattcgttcataaacagataagatttcttatagcctccgtagtctacgactaacttttccagcacgatgcccggatcaagaggtttgaaagtgattgtttgcataccgtctgatgtattcggtacattcagttttgcttttttctcaacgatgcgtcgtgcgactgtcggatagtatatgctgtatacattttcaggaagctcgtttaagttatgattgaaattgatcgtctgatcctttcctccttcaaatccgatactatactcatgtcctttgcgatcgtggaaagcaagagttgatttgactatcacatggacagtcaccttgtcaattcctttaggcaactttatcttgtaggagatagaagctccgtcagttggttgtgtgtaaggcatcagagccatgccactaagggtacgccccatatagggaatcactgtccattccgtatcaggcgctgctttagcgctgtagtaatgttcggcttctatggctatatatccgtcttgtccggtgaatacgtatccgccgacagccttttccggattttcgattcggtagattttaggcagtgtatcagcggggaagttatcattccatgaggtataaccgatatgtttctgaatcatcatattcttccatttgccgccggacataatgttgttataatcgtcactcaacgctttatcccgtgcaaaagcctgttccactttatctgcccattcgttagcttgcggattgttttctttgtacaatttatggttcatggcttgtgcataatacatttcgtacaggtttgccatggcttgaacggggaagaggattaattgcttgtaggcatctttatattccggtttcagtgatatgtattgtctcaaagcttccgcttccagtttcagatattcatcagatacttgtttccattcgccggtctccaggttataagtattccggtcgagcatttctcccgtcacgcggccgttgtatttgctgtacaggtttaagattcgcatggcttcatccgcctggtcttcgccaaactgctgtgcgcagaaacgacggggatgctccagcaagttggagacgttgaattgcttgggattccatgccatatccatgaagagcgtgatcggatattccattggctttaaatcgcctacattcaatatccacagcttttctactccgtaatcgtatgtgagttgaagttgctcccacatattttgtataggggttacgttcagccatttagagtttctcggagcacctacgtagtctacatggtaatacatgccccaaccgcccggatgcttgcgttctttggcatttggcaggcggcatacattgccccaattatcatcacacaatagcatgataacatcatcgggcacacgcatacctttatcgtaataatccaatacttctttatacaacgcccatacttgcggagtctctttggccggacgtttggtgacttcttcaataatcttgcgctgattcttgactacattctccagaagtttcacattggtgcttttactcatggctgcgtcaccgtctccgcgcataccgatggttacgatatcttctgtaccctgcatccgttcgatgccttcacggaaaaactgatcgatcactttttggttagttgtataatcccatgcaccatattctttgcgcttgcgtgaccattcctgatggttgcgtgccatcggttcgtggtgggacgtgccgataatgactcccatttcacttgctgttttactattctgcgggtcgtcagcatagaaagcccagctccacatggccggccaaaggaaattacctttcaggcgtagtatcagttcacacacccgtgcataaaaacgatggtcgccgtagttggtgccgtatgtgtgttttacccatcgggtaagacacggtgcttcatcattcagaaagataccgcgataggttacggccggctctccgtccgagtattgtccgggtttaatatatacatttgcttgtttcatgacgggaacatctgcccaccaataccagggagatactcccatctgttcagaaagctcgtagataccataaatagtgccgcgtctgtcgctgccgatgataactaccgcttcatctattccctcgcaaggattggcgatgacttgcaggatgtatttttcattttttccatccaattcctttttgtctattttgcctgctgacatcagcttctttataaaaggagtgccataagtacctgcaatgatacaccgtttcgaacttgtgcttgttaagagttcgggcttttttccgcatacctgcagtatgtcttgttgaagattgccggcagcaatcattacccctttgtcttcggaagaatctatgtatatcggacaaggaactccgttggcaaccaacggaaaatgattaccggccggtgtgaatattacaaattgttcagcggcaaatgccgctatactcacaacagagaggtagaagaatagaaataactttttcatggtttcaatatttagtaatttgttgttaatcattgatcttatgtttcacagtaaccggatattctatttgttgataattggtaattggaaactggatgcaggaagtccttctgtattatagatggaagagggtggattgttttcccatgcatagcggatgcttgccggtattccttttccgttccataaagcaattactttatccccttcggtataggcctctacaaatttatattttccatcattggcagcaatggcaatgccttctaatgatttagcttgctttaaagagcctgttccttgcctgaaagagataacgatccgaccgttttcttttaattcggcagcttcagccataggcccttccgctacgatattcttctcaccgaaagaaagtttgttcatttgaagcacacaacggtgtgccaagtcttttttgttgagtggatgaatatcattactttcacctaaatcaatggcagtggccagtccgacattctttaactggagacttgccttgcgttgtgcttcacgtacttgtgcgttgccactttctacaggcactttgcttctttgttggtaattcgcaagttgcacaatgacgaaaggcaggtttttattgttccattgggtacgccagtcgtttacaagatcaatcagatgtctttcataatgtttgctaccttcaggacccgtatccgactctccctgataccagattatgcctcgtattccgtagttgcgtagcggatgaatcatactattatatagtccggtgggttcattttggaatccgatagtggaaggaatacgcttcattgtacagcctattttatgctgccacatagcggtcagtggaattgtctgaccggctatttccaattggtaaggcttcccttttacaaattccggacgtccggcactgctgacaaggcggatgacaatctcgttttcaccggcacggagtaagtctgtcgggacttggtaaatacgcggaggatattgataacttgttcttcctacacagataccgtttatataggtagcatccgagtcttttagtgttcccacgcgtaaaacagcttgttgtccggctaatgattcgggtatgttaattcgctggcggaagtaatggactccattgagaggagtgttccagctacctccccaattggagttgaatacatccacttttttccaatctgaagcgtcgaaaccgtcacttgtccatttttctttgttcccaaggtcatttgccgattgctgtcgatgccattgattcacttgttctttttgggcgttcttcacagaatccggataatcaggatggaagtactgtggggactggagcttttcccggaatctggcatatttctcgagtgactggcgggtagaccatgatgctatgtttgtccctccccagctactattgataatgccaattgcaactcctttttctgcctgcatttcttttgcaaagaaataacatagggctgcgaagtccaacgtattctcccgggtacagattttccattcattattgctatcttgttgaggctcgataaagttgtaagcgtacgacgttttggtataacggatcagattgttttcatacgacatgatttcatccctgtatttatccatgacgcgctttacggtaagttccatattcgattgtccgctgcatagatacacgtcgccgatgtatacatcttgtattattttctggttgactctcaattcgtagggacctccggccttgtgcttctgcaggttgaccgcccattctcctgtttgggaagcccgggttttgtattgctttccgttgaattcaataacaacagtttctttaggatctgcaaaaccccataatgggataggggtgtcacgttgtaaaaccatcttgtcggaaaagattccgggaagtcttacttctgcctgcattcctattgtatataacaacaggctcaaaatgatgcaaatgttcttcttcataaatattatatttagcgagattatcttctttgtgtcttaaattccagaaatggtttatttttcgtctgtactgtgacacgatgcaaagatagttggtattgataagaacgggctttgggtatgtttcaattatttattctgttgatactaatctactatttcttgaagtttttttctttggggataaaatgaagatgtgtgaacaaaccggtttgttcaataaatgtttttgattttgtttcaaaatctttttgtattgtatctatgagactgtcggatgaataataatggttaatgtgttatattccgtattaataagattggtatgtgatgcgtataatatactcttgattaaacaagagtaagtagagattttaatgatcttgagaatatcggtaagcgtcaatcgctttttttacagaaccgtgtaacaacaataatttttgtgcatggtcatgatctaatcccagttcctccataatcatcctggttcctctttctaccagtttatgattactaagttgcatgtttaccatcttatttccttttacccgtccgagttgaatcatcaccgacgtgctaatcatgttcagaatcattttctgtccggtgcctgatttcattctcgaacttcctgtgacatattccggaccgacaatcatttcgatggcgacatctgcttctgccgccatcggagaattcggattgctggtgatgcaacctgtcaggatgccatgcttgcgggcctcccgtaaggcaccgattacataaggagtagtgcccgaagcggcaatgccaatcactgtatctttttgattgatatgatattccgtaagttcttcccatcctcggctcatatcgtcctcggcaccttctaccggattgcgcagggctgtatcccccccggctatcaatccgataatccaggttgggggcattccgaaagtaggaggaatttcggaagcgtccagcactcccaagcgcccactggtacctgcacccatgtaaaagatacgtccaccctgtttcatgcggggtacaatttggttgacgagctgttcgatttgtggaatggctttttgtacggctaacgctaccttttggtcttcccggttaatgtcttctaatatttctcgtacggacttcttttccagattgtcgtagagcgacggttgttcagttatctgcatattgataatggcaattgactaaaaatacaaattacaaggattgagatgaagcggtatgatataaaattagcccctccatcggactttgcagaatctttccgattctgattcctgtctcttgtgcagcttcttgtaatatctccctgtagcagtgagccactgatccgataaaatgtacagggtactgcgtgtaatcatattgcattacgtttcttcggaagaaagcaataaaactatcaagcactaattgtcgtatccccggctcttccagatgttgcgctataaagggggagagacttgccagaaaacgattcgggaagggttggcgatacacccggtcaatgatttcgggagccgtcaggtcgaactgttttaagaaagcttctttgatggcgggtggaagctggttcttcaggatgtctcctaccagtaatttgccaaggacagcgccgcttccttcatctcccaggatgaatccgagaggggagatgttgttgacaatctcttcaccgttgtagaaacaggagttggaacctgtgccgaggatgcaggcaatcccagcttcatgtccgcatagtccgcgggcagcggcaagcatatccgagttggttttgatatttccgatcacgggtaggctgtcggcaatggctcgtcggagaacgggagctctttcgggagtgcatcctgcaccataaaaaaagacggagttgatcgttccttccggtagttgtggcaaaagggaatgtgtcagctcttgttgaatctcttcttctgattggaagaagggattgattcctttcgttccaattcgtttgattggggtgtcgttgaaaacgatgcaccagtcggttttggtagaaccactatctgcaatgagtatcatatcttaatgtatattttctttttgtataatatatagcctattgaccagttaagtaagacaaagaggatagcataggcaagagaacctccttcatccccgaaaacaggttggagggcacatctgtagacgacttgttggatggagacactttctccctgataagtgacggtgatagcacctaccaaaacggcgatgacacctgccattacataaataaagagaggattcactccgaaagattcaaagaaacggctccattttttacatcctttgatatcgataatccagacgagtaaagctaataggctggagcctaatccgcaagtgaccagcacaaaggtgggcgaccatatctttttgttgaatgggcaactatagctaaataggaaacctgcaaaagtcaggatagtaccgataaggaaaagccgttccaatttttcatgtatatcttttacttccatgagtagtttgccgacgcaaaatccgatcaatacgtgtgcgatagaaggaatagtgctaagaagtccttccgggtcgatgtggttgtcttgatacatatgagcgtctcccaagatgctgcggtcgacgatggaaagaatattcgtttcgttgtaggcaaaaccattaccggtaatgagaataatgaaataacctactaataataccacaatcagataaggtatatacttgtgtttcaatagcaaggcaataagtgctgaagcaccatagcagagcgcaagacgctgcatgactcccaagatgcgaatttgctcaaatgggagaggattgtgggtgtaacacagtaaggcaaaccagttgagggctattccgataaggaaaataacaatggttcttttgattattttcagggcagccggagtactgaatgtaaagttatactttttaagtgagatgtaggtggagattcccatgataaacatgaagaaagggaaaaccaggtctgtgggggtaagaccgttccattgggcatgttttaggggagcgtatgcatgtccccaagagcccggattattaaccagaatcattcctgcgatagtaatgcctcgcattacatcgagtgccaaaaggcgtttgttacttgttgtattcatgactgtcactttttaatgtgttaagttaataagtaagtttattgtttctttccgaaagaatcttccagtcggttgcggatcattaatgaggcgacgataccgggtagggtacaaatacaaacccaaataaagaagttggtgtatccgagatgctcctgtatccatcctgcaggcatccccggaagcatcataccaagtgccataaacccggttccgatagcatagtgcgccgttttgtgttcgccttccgcaatataaatcagatatagcatataagcggtaaagccgaaaccatagcccagttgttcgatagctacgcaaatggctataaatataggattatccggagtggcggcagccatccatacatataatagatcaggaaggttgatagctaacgccataggtaatatccattttctgaatccgtcgcgggaaacgaggaaaccactgatgattccgccaactaataaagctatgacgcctatagttccatagatcattccgacagttgcggtagataaagctagcccacctttatcggtagcatcgagcaggaaaggagaagctattttggctaactgtgattctcccaaccggtaagtgagaaggaaaaagaacatgagacccaggttctttttcttgaagaaggtgacaaaggtcagaagaaaatctcccaacaatttacccggtgtgagtccgggacgtttaatgtccgaatcaggatgggggagaatcagacgatgatagatagtaagagcaagaaacaatcctgcaagaaggtagaatgtaatactccatgccaagggaatattgttttgtgatgtttccaaccatcctgccagcatgacaagaattccctgcccgaaaatgttggcaagccgatagaaggtattccggataccgacaaagaaagattgttccttattattgagtccgagcatatagaaaccatctgcagcgatgtcatgtgtagcggagctgaaggctagcaaccagaaaaaagcaagagtcaactgtacataatgtgcagttgggataaagaaggctatccctgcaaatccggcggcgatgaaaccttgcatggcaataatccaagcccgttttgtttccaccagatcgacgaatggactccatagaggtttgatagtccagggaagatagagccaggaagtgtataaagctatttccgtattggataatcccaaacgcttgtacatgataacagcaatcgtcattaccgctacatagggcagcccttctgcgaagtagagggttggtatccagctccagggatttctttttatagtgggtgttgtcatggcattgttctttttttcattgatattgtttttcgagcgtactgccggggtaatagtgagacagtatttcttcatacttataaccttgctctcccattacggcagcaccaatctgacaaagtcctactccatgtccccatccggctccgataaggatgaatcgtgaaggatttttatcttttttatgtcccttttctttatattccttgtctattacgaaggcagaactataaagatgggaagtagatagggtacgacgtatttccagctcttttccgataataagtgtccgcaaggttcctacaatcttcaatcggacaaggcgtcccgacgttccccgttctataggaattaagtccagaatttgcccgaaatcaatccccgaacgttgatgaatcagggttgaaagttcttgttgggagtagcagactttccaacgatagaagtctgtcgtttcctggtcatagttgtttaaaacctggcttaggatctttttgtcctgcgtgtggcagaatgcgacaggagaagtacgaatccatttatcagcctccgtctctattgtcaaatcgggtagttggtcttcgatcttacaatcccgttgaccgatgagataggggtgctttacgttttcccaacaattctggaactcttcaaaagccccgccgcaacatttagagaaacgggcatcacaaatcgttcctgcatacatcaatacttcgccccgggtagcagtgactgcttcgatagcttgtggtgttgaggcacgtgtgattccttgataccgttggcagtgatcgtctgcgcatacgtcaaagtttttgtgcgcttcgtggtcataccatttgataaattgagaatccgaaacgaaagatggagaacaggttgcgctatccttctgtatagactttcctgttttctcgttcttcatttcctgttttctactctctgtcttccacttattcaacagccaacttcgggaaataacagcatgtgcctttagtagttctaaagaagcagtagcactcatttctgatgaaatcacactgatgagatattcttcgatggaaataatattgatagcagtaagttgttccccttcgacgatgatctttaactcccctttgaatttctggacttctttgcgttcccaatggaagttgattccgatggtcacatctttcagttcaaagaaagcaggtgcaccttgttggggagtgaaagataattcattatattctttcccttgccaatgaatcttcccatcccggtaaatagccttttgcataccggagctttctgtttcgtcggaagagataaattttatagggaaagagaattcaatctctttcccggaaaggataccaacacttattagagggacttgcatgctattttattactatttcttcttgaataattgatcgcatagagtatttaactgttggggagataaacttatctccttgtaaatctctgtgagttttttggcgtttaatttatccatgtcttcttctctgacaatcgggaatatgccacccatttctgcaacagccggacttattaatagccctttttcatttggggtataatagcaatcgggacgatgttttgagcgtaggaaaatgatgcaattccatacttctatttcgtcacctccgaaatggcttattttatcgagaccataccaggttatcatgttgattaaaggttccttatccgaataaatgacggaaagattttggtagaccttttcaaattgttgcattaagtcaactttcagacctgatgtcatacctatgcaagttgtgaatacattgtctacataagttgttacgccgttttcattttctaatatactcttcaagaaattcagcgcaaaagggttagtcagttcttcttcttttcctgctgcctggaaatgcatgtggtcaggggcggaagcaccgcactccggtccgttatagagtatatagaactcgtccaggttttcagctaagtgaagcatatcttcaaaacgtcctttcatgctttgtggagtgtgttccttgtcgatgattgtcaagtgacgctgaaaaatggggtaggggttgaggcatacctcataatgtccgaatggtagatatgtttgctctgcggggcggttttttccgcataaaaaacaaggcctttcctggatagaacgactatctgtttttgccatggtcgagaggatgcgttgaggattcgggaaaattctaactttcatctctctatcttcttccttcagtttcaatacttttttcttttccagattttcttccaacgcttcatagttccttttcgcaagttcccagttttctttttggttttctatcatttcctctacaagttcctgaaactcttcatcaatagtatgcatctggattctgcccttaatttcccatgtgcggattcggtctttgtagaagttgttccgattgactttttctgtgcttaatgcggcgtcagagttaccttcccaacggcgacagaggtatattacatcatagatacgtccgatcttatactcccgtgagattcgtaatcctatggcgtaatcttcaccatagctggtgttcggcaatttgatattacgaagaataggagtgtagaaagctcgtggagcacccaaaccattgatacgtagagcgttgttctttccattttccggtgtccactctttgtggtcaatgataccgggggggatttcgttcagttggaagtcggtcattagataggtacctataaccattgcgcagctttccttataaaaggtgtctacgattttctgtaaagtggattcatctttatataaatcgtcgctatctaactgtatagcgaactttccgcatttttcgtgacatatacccttgttccagcagcctcctatacctaaatcattttcttgggggatgatatggatcaatcttttatcgctacttagttcctggagaatttccgtcgttccatcggtggaatgattgtcgataacaataatgttaaaagagaaagtggtccgttggtttaaagccgaattgacagcatcgcggattgtatgagcacgattgcgtacagggatgatgacagatgcctcgaattcaaagttttcgctgtgaagatttacaggccgtgaagaagtaggcatgaaataagcatcaatacatttcaggtattcggtacaggcagcttccatttcaatttgtacttcccgatttttggggtttacatagtcgaattgtttctctccgctttttctggtatctgtttcaatttcggtgtatagatattcattgatgtgcacaattgaatatttgtaagagatgaatagacgcatagcatatagtcctgcgtatttgtactcttcacgcaaagcatctgctattttagtgaaggcagaagaactgaatagaagcatggaaccgaaatcgaaatcatcccggacgcttcctaattggtagtcaatgacaggtgcttgtttaagttctccgttaatcagctgatagtggtcggcataaactattccattctttttatcgttctctatgatttgcaccatgcgttccaaggcatacagtcccagttttaatggagtttgtttcaagtagaacagagtatattccgtattggcattggctgcaattgttttcattgtgtctgtggaatagaaccctttaacagagagatattcacaacccggaagagctttcttaccgggctccgaacctaataaatagatcttatttactagctctgacacttgtagttcctttactgtctgcatggtatcttccggagtgccgaaaggtatgaagcaattaattttcttcttcatcttcatcttaatattaaagaactgtcgtattgtccatcgttgatttctttcgaatgaggaagcaaagtccgatgaaagtaaatgcagcgttaaataatagcagctcgtaactaatttggtaaccgttgaaccatgcttccgaatttcgttgcaggatatagcaaagaataggagaagcgatagctaccaacggaatatatttatcataaacttgtttcttggtgaagatgccgaaagcgaacaaccctaagataggaccatacgtataactggccaatgtgtaaatcgcatcaatcacactggtgttgttcagcaaattgaatacaaaaatgactgcccccatcacaattgccataccgatatgtacctgtttgcgtatcttgctaagtgccgcctctccttttatctgtgcatgtaaaatatctacggtaaaggaagtggtcagtgccgtcaaggcagaaccggctgcagaataggcggaggctatcagtccgataatgaataatattccgactatgccgggaaaataatttccggtagcaatcatcggaaacaactcgtcgcttttttccggattcccaatgccttgctgtgctgtaaacgtatataacagtactcctagcatcagaaaaagcagaatgacaaagaactgtgagattccactggtaatcatatttttctgcgagtcccggaagttcttgcagctaagattgcgctgcatcatatcctggtcgagcccgttcatggcaataacggtgaatacacctgccaggaattgtttgaagaaatatcgtttgtcgttgacatcgtcaaaaaagaatgtcttggaaaagtcactatctgaaatcgtactaaccagaccgctgaaactcagatgcaggctggaagcaatataatagatgcaaagtacaaccgacactaccaggcagaatgtttttagaacatccgtccatatcaatgatttcactccaccgcggaaagtgtaaagccatacgataaataccgtaaggatcacgttcaacaggaatgggagatggaaaggatcgaagataagaaactgcaatgtcaggcatacgagaaagagccggacggctgcccctagcatctttgaaataaaaaagaaccaggctcccgtcttgtaggaagagcttccgaacctgttctccagatattcataaatggaaaccagattcatgcgataaaagaggggaacaagtacaaatgcaatgataatttgtcctactatgaatcccagcaccatctgcaggtaagaaaagcgacttgcctgtaccatacccggaacggaaacgaaggtgactccggaaatggtggaaccgatcatggcaaaggcaacgatataccaggctgatttacggtttcctacaaagaatccttcattgtcggctttgcgtcctgctatataagagatagtgaacaggatgataaagtatgccacagtagtaatagatataacggctggactcatatctgctgtttaaattcgtttgaggatgaatatccggaacttgtttactttgcctacaaatgtagggaatttatcatagatatacatactcttacatattttttattccgggtgtgcctccggtggcatgtttggaggaacgccagtttttgttgagcgaggacaactccggagatttcttttcaagcgaaacgccggttattttatcaatggtgtgcatttcatctctaaaacaacaagtgtcaaaagtatgtcctggtgcagtctctttactacttgaaagtgccagatacccgccattattgttcagtgccgggaagttcggtataattattatattttctccaccgactttatgtttctgaacaactctgttgaagtatttcgtgaagcaaagatatgctttggcaggaatggttaggggagtagaaggactttcattttgaaggatggtagtattgtatattgccccgtctttatacatcttatatagataaagtgccggtaaaatgatagcctgttcagtcggattgtagatttctatatattctgcaccatcagtagcattgttatacatgatttcattgaaaagaagcatacctctcacatctttcggtaattcgggggtgttcggattatctggaatgtctgttccgggatgatcgggtgtttcatcaggtgtagtgtccgtttctacgttattagatagctgtatgtgatgaaatgtaaatcctttacagcgggttttggtgtaaatgcagtatataccgcagtagcgggaagtttgtatatcggtatcttttatttgtttttcttttacgtattcattctcggattcacgtcgtgtccaaaaagtccagtaaccattattgtcacgttctacttttatatatagtttcggtgaagagtctcctttcatcaactctcttcccgaagccagtagtttagattggtctccgttttgacgataaagagttacattatctttggctcctcctatctgaatataataaccgtttaaattaccggaaagaatgtttgaggaagaagtcagataaaatcgtgcataattgttagcggaaggattaaaggtgaggtgaactccaaattcccaacgggtattttttacagaggtggaaggaatggtgacataagctgttccggcgtcttcgtatggatcattcagatggattccttctttagaattgatggtgaatttgtccatctctccttcccagggaagttcggaggtaactgtatcctctccctctgaatctcctttttcttcgtcattagcagggagcgaacaattatagaacaatatgatgaagatacttaggaaagcaaatgctttgtaaactttcatacggtttttaatttgagttttttcgttttaccgtatttgtttgtgtataatgcagaagcaattgcggtctgaatatttgaatgagtcggcaaagataaactttcttgccggaaaaagcccatacttacagaagaaaagattgtaattctttttgtttcctatacacgcatgggaagaaaactgtaagggactaccctaagtcatatttaatagattgacttttgatagtcccttacaactgttacattcaatatgggaatactattcgaaacgtggtattacatatttatcagtataagatgtgaaagtaataccgggcatggaatgagtagacgatgcgttctctaattttttaatcaatgaataatcgtcggcattcaatgcgtaataattatcagaggtcggagtagtcacacgtaccgtccaatcgaacatattaccgatgatggttaatgcatccgtttcgggattgaatacaggaattcctgttttcactacttcgtatgtccggctctgcagtacatagaaagcattgttgacatcggtcatgaacgcaagtgttttcttatttctgaactctgtcagatacagatgttccagtgtcagtccttcaggcaaggtgatggcacgaacatacggacgccctttcacctgtttcagatgaaacagacggcggtcggcatccaatagaagataaccttcgtcatactcctttttcaccgttggatttcctacgatctctgttgccgggaaacgaaactcctttttagtcatagcttcggtaaactgaagactcttgtcttcctttacgctgttggaggccatgtcgataaactcgattcctttggaggtgatgcggaatacgtcatccggcattttcaggtctacacgtcctgacatggattccatcagaggataaagtccgatggaaggcgcattgatatccgaaggtacactgcggaagttgaaattctccgtctgtaccattttaggagttactgctatccctttaatggtatccggaaaacgctcatcggacatcaactgacgaaaataaaacataggcaggatactgtcgaaagctgcttccgaataaatattacctgccaggtcgcgacgcacgcttccttttccctcttcctgtcccatctgtgcgaaatcgccaattacgaaactgtacagggtaaagggagttttctccggctttacgacaaagaaattgtaacaccagggcaactgccagagaagcagaaaagcgatggttacatataataatatagtactgaaacgtctcattactcaatcttttaatttttagtctttaatttttaattgctcctagtcctgctttccggccttgaatcgtacgatagaaagccacgagaaagaagctgtcaacaatgtataaaccactaaataagggaggaacttgttatatgcttccggtgtgggcgacagaaagaagattcggagtaataatactgcgataatgagattcagaatacgacgtttccatgccggttcaaggcagatccaggccacaagcagatagccggaaatcccggcaagataccacgttaaagcggtgagcaatatgtggttcttcagttcatgggcaagtattccattcaggtatacttccatcaacagaaaattggaagcgaagcagacaagtagcaacactaatcccgaaagtagcatattacctgtcatcttcaactccggataaggcagatggagagtcagtttcaggcatttgcgctgcatttcgggaacaaactgcacaatagccatcaaaattcccgcaatcagagggatatattgcaacatatcaatgaagatgacatctcgttgcagcatcacttcccacacatgagcagcccctttcatttctaccacccggttgatgcggagcatacagtagcctgtaaaaccaagtgtggcgagcacggcaagtagaaaataccaccgtgtctttatccattctttataaaatatagcgtacattgtttttatcaattatcaacgattctagtatttgcctgtcaggccgataaatgcatcttccagattcacctgttcactatgaaaattagtgtagggcactgacatggatttcagttttgcttcagtttctgccggttgaaggaaagagaaagtctccaactggttccgcatgacagaaggatgatagaaatcatcagatgcgggaagttcgtagccttcgggaatagtgaaggtatagcgacgtcctttttctagtagttcggcaattggtttctgaatcagtatctttccgtagtccatgatgatgcagtcgtcaacaagccgctccatgtcctgaatgatatgcgaggtcagaaagacggtttttccttctgaacgggcatagtcgcggaggtagtcgacaaacaggcgacgatagccgggatcgagtccgagggagaaatcatccagcacgagaagttccgggttctgtgcgagaatcagtccgagggctacttgtgaacgttgtccgcaggacatacgcgagatacgttgtccgggagcgactttcaacttattcatcagttcatagtacgcttcctttttccattgaccggggtagaaagctgcgtagaatttctctatctcggtgatggtcatgaattgatattgcacatgaccttcgatgagcagtccgatattgcgacgcagagccggtgccattgtctgaatctcctgtccgaagatgcgacattctcccgaacggggtttcaggtaaccgctcaagatattgatagtggtggtcttgcccgtaccgttctttcccaacagtcccaagatgcgtcctttgggtactgtgaaactaagattttcgtaaatcaaccgtttgccgtaatagtgcgtcagattgttacattcgataatatgttccatttgattttatctgttattctattcaaaagaagaaaaggaaaagaatgggaatcaagattccgacaatgacttcgatccctcctctgccgataatgcccttattccctttcagcatgataatgccggagagagtaatgataataagagcgatggcgaaaatatcagcaaagtaagtccaccattgtcccgggttgtaatgtaagcgggacattgctccgataagcgggcggcgggtgacggattcatataccgcttctcctgtcttcacgtttaccaggagattggagccgcctttcaggaatactttcattacgtccgttttcgggaagtaatatttggtatagttgccgctttctcccaatggttccaggagagtgagcactttctccttattcattcctgctttatccggtagcttttctgctatcttatactctttccgtgtgatggagaagttcggattaatagtgtcacggtgattcattacaattccggaaatggcatatatcaataccattccggaaaagaaaaatgataagtcacggtgtatgagccgactccacttacggatgttactactccacttcatacgagtcagcttccatgaaatagaaagataaatactcttttcctgtttctgccttgcggtcggctatttttgcacggaaatctgcaatgcgggcttcagggctgttggctgtttcaccacgtgctttcttttcagagtcgcatccggcttcaccggttccgtgtttctcggcagcctgtgctttgagttgcgcttcccagttctggaggtaggcttcgtcaatgcgttgttctttcagtgttccggtaacacgaacgatggagttcacgcatttaggatcgaatgctcccaaagtgcccgcttctacacggatcacatgggtatcgtcgctacccatcaggaagattttctttgcgccatgtttgcaggtatgtgtgcagacgccttcaatggtcacttcttgtcctgcaaggctttcggcattggcaagaagagaatcaatttccaaggcggaagatgcagactgttctgtagtcgcttctgatgcgcttttctgttgtttgttaccacatgaagttccgataaaagtcattgccacgatggcaattgcgattgttagcttttttgttttcattgttattgcttcgtttttatatagtttgtaatctgtttttcgtttgtttatagcttatcgtagttcgccttacgggcgaggggagtagccttacttgaaacttttagtttcccagtgtgaaactggtagtttcaaaccttgaaactgttggtttctcaccgagaaactaaaggtttcaaggcatgaaacaaatattagtcttttagttgccggcttgatcccttatgcaacgaacttgcataccggctttaatgctaacataagataatgataatctgccttccggatacttggttgcattgattgtactcattaatccaaagaactgtatattggttagtaggccgctggtactattgtatatgggtttgtaggcggtcgaagtcatgagataattcattgccggttttccatgccacgcagcttgaatcttggcgtcatctgctattgcagttttttggtagctgccggcgcctgtaagacttgttgccatacgaacaccggagaattggtaattgaatcctgcatccatcagtgatgatattttggctccatcataagctgtatcataaaaaagagctttatcaccatcagccggtaccttgccgtcggcatcattcgttgtttttcctaccagattaaagtactccagacgtgtcggtatgtgccatcctttcgggcagattccttgtgctccttcaaaggaggtcagattactatcagtaatttctttaccacccagtgcagcctggaaatcatatagataacctaattcttttatggcactttcttttgttgtagctacggttgcaccgtcggctgtgatttcatacggataccaaacatggctatcagcagttggatcacttgaaggagtataccctttcggtaaataaataagcggttcagccatccatgtcgtaccgtttgagagagttacagtcttatattttacattatcatacaggaaatagttctgatcgagatgttcctcgaaaggaatctcattatcagctccaatttcaccctcatctgtccagttttcaatgtcaccactaagtttgacttctatatcgtcaggtaacacgcgaatgttcacactgtattgtcctccttgtgccaaagtggtagatgtgagcttctgtgacaaggtcttgccgtcagatgttgctacttcaagcgtcaaggctactgtttggggaacgataatggcgcggtatgtctcattcgctttaacggcttgtgcaacaatgcttgttgcggaggcgtttgcatcagcagtcactgtgagagcactcaaatcaagagttgcagtcgggatggaacctttcaatgcgatagacgagatgttagcttctacttcctttgttacattaatcactaatttagtaaacatgtgtttgaagttcatgcttataacgttggtagtcggaagtacatccgatttctttgctgccataaaatctgacgctccatatccactagtctgatcggtttcaacagtaaatgaagccggagtattaccctctttatagggataataggctactatttgcgatttgtcatttccttccgggtaccagagtaaatcgcctgcaaatactccgtcattgtatgtcatctgtttattctctgcatatacgaagtcaccgttttgggtgattgtaacaccgattttatctccggtctcaaagttaacttccgtagcacgtgtaataataggagagatagtaatgcgactgtttgcaggagtcgtagcttcgttctcttcctgttggcaagataccaaaagcgctgctgcgaagataaatgtcaaactctttttcattgcttaataatttagtttatatatattcattgttttcaaaaagtatatcctaatttgatagtctcgttccaacggttcgaaccatctatatattgcaggttgaaaccgtgcgtataactaccctgtacttccgcataaattccatggttgaaataatagcgcaatccgagatgaaatgtcgcttgtggggcggttgcatattcatttttcagattgtaataatcagtcagccgataaggcggatcacccggttccgtatctgttgccgtagtcctgtttttctcggtaaagtttcctatggcaaaggatgcagccgctttcaggtcgagtttccctagatgaaatacgctggagatataagtctggctacaaatcatcttttccgaaaccacataaggatacatctgtgtggtcagtcgtctgaatgttgatatattcgttcccaggcgaagttccgtgcggggactaatcaattcatattcgggatggacggagaaaacatcctgctcaaaaatacgattggaaccgtgtacgtgagtgttcgttatcccgttcacagtttctttggttatcacattttcgttgttgaccagatgtgaccattgcaagttcagtcgcagaaaatgctctttctttccctgtttgaaatgataactcaaatgggaggtaatccagtgggttggaaatttaaaccagatagcatctctttcaccggcagaacctgaagaatacgtgtattcagcatctccgtaaaatcctttccattgaagttgcaaggctcccccgttcgacaattctttgatggggaaaccgttgacacccgattcactaagatggattccactcccgtcccatgcctcgtaagctccatacataagtcctttatccagaaaagcattgtaagagttttcggctgtaccgatgacttctgcttttactgattcgctatttttgccgagaatataggaaaagccgatcgccatatctcccgaatgatacatgatgctgggggctattttcaaatccagtcggtaattggtatgccgcaagtcctttcgtttggaatagttggaggcggcaaagtcaatctttcctcctaatcgccagttgggtgaaatatcagttgcaataccacccatgaaagcgtaagtttgcaagtctttacgtccgggtgtgaactccaggaggtctacgggataaaatcctgggtggataaacatcgaaccgctcatatccttgcctgaagtatgatcgaatgagaacgaacccgtcagtgaataacctttcagatgagtgatggactttgctaccgctccggcactccatgcttcttttgcttcgtaatagttgcggaaatcaccgtggttattctttccgtacagttcggcataggaagcagaaatactgtccatcatgatacctgtgacatttgccccggcattccaggagttacgccgttcgatgatgtcataagtctgtgccgaaactccggatgtcagacatagaatccaaagacctgttatatatattttcttcatctcactcatgcaaagattgtttttcccgttcataaaaatcggtagaagagttgtttgtatctaccagtacttcgtaacccgcttcctgtgtcgcttcttcatccacatgacggtataaactgcgtccgttgtatgtggcactttgagtgacatatcccgcatcgatggatggagaaatacgctttttattgttggaggaaccgccataatatacttccgtgccatcaatcacccaatcgagtggtaccgctatcacctgatccgtagtgcttcccggtttttgtatgatacttccctctttaagaacaaagtcctgtatcgtggtatccttggctttaaaaataaccgcggcaggagaaaatatcgagaatgaataggcgttcgcctggccagtcttcaacactacgttcaggtaatgatccggtgtgatctggtcgcccggagccggatgatactgtgtgttcggaaaataaacattattatagcatacaaaatatccgggtttgttcaggttgacagattgcggatattgtgccgcatggtcaaccgctccgttgatggcaatcactgcatcttctcccggctgaagcgggaacgttttaccggtaccgccaaattgccagatacactgaacgatgggagcaaagtccttgaagatagttgctccggttgcttcatcctgtgtcacccatacattagtggcttgtgaattgtaagggtcgagtgctccgaagcataaactatccagatattgcacttccgagtcgttattatgcaggataatgtacttgtcggattgataatttccttccagcggtaactttgtgcatcctccgcagtaaatctctttaataatgatcgtcccggccttggaatgaatgagcgggagattaagagatatgtctccgctggttagtttgacattatcagctaatccgttgaaaatatcctttccgcctttgtcgctgacttgtacgcggtatatacctttggtcaaagagaattgcgccactccattcttgtcggttttagccttgtaagaatttccacggtcgacatcttcaatctttacggtcactccttcccggagatgatccgtgtatccgtccggatatacggcagtaacctgcaggctgtgcaactggttgtcatacggattctctttatcgatatctgtgcatcccgcaaagatgccagtcactgttagtaataatatgtagatgaattgtttcatatagttagaatttgatacggcaagtaagtccataatagaaatccggggtgaagagagcgcttacacccgttgcatgagattttacataaggccgtgagttggtgaaattaatcgcattgagagaaagagatacatagtctccaatctctttggtgatattgatattggcagaaaaataaggatcatatccgtctgctgcaaatgtataggcattgcccgatttgcgtatcaggtaggagaattccggattcgcggcttccgctgatgtgaaaggatgcatctcattattcaggtcgaggtatgctaccggccagatagcggtataagagttaccgtcatagatacttcccccggtttgggtattactgctttcgctcacattgaaagcatattcttttccttgatactcggagatgttctgcgaacgcttcacaagcgaagcttccagtcggcacgagataatcagtctggctttcggaatacgggtgatggctgtgatattggcatccagcgagtgggtacgcttgccgttggcagtagtcgataagttgtcgccgttggcgtagatacctacatattggtaagaacgattggcaaaactggtgtgcgaccatccattctgataataatacgataaagagttgtcgatgtatttcgtataagtataagcggcatctacccggaattgcgtgcgaatcggagtaatttccgggaaatcaacaatcatttccgctccgcgacgaatcacgtccattccattgtcgggagaagttgactttacaaaagtctggtcggtcactttgacatccataggagtccagtaactggatgcattgtcgcgtatgtaaaccatccctgtctggttatctacattgatttgcgggttagtcggcatagtgaatccatccggcaattggagcacatcataggagaacggagtataagtacttgcgtatttatacggcagcttggtacggttgaaataaccgactaatgaaatccgggtacgggcaatgttgacgtccagaccgatttctgcgttctgattccgttgccagcgtaggttttcattgtgcaataacgtgtagggctgactataatatatataagatgattcaatcttattataggaaaagccgaaggtctgtatgtcccgatattcctgtttgggatacaagatatagaaagagggaagtttttcggtaattccccaaccgccacggatagcgatatgttcgttcaactgccatctggcattgaaacgtggtgaaagagtattcaggttcttatatttcgttcccttgataaacaaatgttcccaacgtacccctgccatcagtctaagcatggtatttcccacaggaaatgacagactttcttctgcataaagcgaaacattatgcatatatggataagtagtgtaaggacggggacgataaccgttcggagccaatgacgggtctttgtaatattctccttcacccacattgcctgttgctttccattgaacacccgctttcaggttgctgtttacagtcttaaaccgtctgttccattcatattttaacgatgcggcataatccagttctttggagtcgatgatttggtcggcaaagtaagtatatggcagtttgtttgccataaaatatccttcctccgtggcatgaacagccggttgctccgatgcatacgagtagaacgtatgcgcgtgggagttattatcattgtaatatatcgatgcgtcgaacttgaggttggttatccacgatttgttgagcagccaggccagtgaagtgtttgcccggaatacgttgtctctcactttgttgtattctcccgaataggcatcaggatcatctttggtattcattcctccgatattgcctgtaacaccgatgtcgaatcttaatacgttgcggaacgtgttgctatatccggcagagaatccccttcttgtataagaagaatagggagataccaacttttgagtagccttggtccactcaccgtttatgttgatgactcctttatcgtttcctaaatccaatcctttagcaaatgaaacctgttcggtgcgaggattgatagacagcaatatgttccagggtgttttccctttccgggtgtgaatcttgaccataccactattcaagtctccatattctgccgaaggcactccggtgatgacttccaccgattcaatatctgcaacagtgatattccgggtatccactccgctcatattgccaaacgaaccattgtttccaatacgaaccccatccacttctacggctgttccaaatgtggcattaccagctgttgaccctccgtcgcgtaatgagaagatattattggtggtaagatccggcactttagtttttcctcccggaaggagagcggagatatcgctcacgttggacacctgtaggtgttccaatgcatgatttccgatagtgagcgtcgtgtttaattcatttttgggtgcttgtgcagtgacgactacatcatccagtgcaagtgtattttctttgagtatgataggaaggttattgatattgctgcgtacatttacgggaattgttgccggtacataaccaagaaaagaaacctccagattatattttccctcctgtactccttgtatcgtaaattctcctttctgattggatacggcccacaaataggtacctttaatgagaatagaagcaccaggcaaaggggaattcgtttttgcctcggtcacacgtcccgagattgtatagatgtttaaattagctgcggcctcaaataaattgaaaaatagtagcccccagaatgctatattaaaaagacaatatttcatagataagttttgcgcaaaattcgataaaaagtgactttctatcaatcactataaatagttattttggtaaatgctgatacctataactagtgacttcttacctacgaataggtattttctctctaattacggcttggagaataaaaaaccggcttgcattgtgatcactatcacattgcaaaccggctgatttattgggcttatctatagttgtccggatattatatccagtctgttatattagatattttttactttaatcaaatattcggcaatctgaacagcattcagggcagcccctttcttaatctggtcacctacaatccagaaagtcaatccgttttcgtttgtcaggtctttgcggatacggcctacgtataccggatctttacctgccaggaacaacggcatcggatattctttttcagccggattgtcctgcagcaccagaccttcaccgttagcgaacgcttcacgagcttcttctacggaaatcggacgttcagtttctacccaaatactttcagagtgagcacgtaatgcaggaacacgtacgcaagttgcgctaacttttacgtcagaatgcatgatcttgcgtgtttcattatacattttcatctcttctttcgtataaccgttctctgtaaatacgtcaatctgcggaatcaggttgaaagccaactgataggcaaacttctctacagtcacaggttcgtttgccaatacttgacggtattgttcgtacaattcgtccatggcagcggcacccgcaccacttgctgcctgataggtagacacgtgcacggtttttatatgagaaagcttttcgatggctttcagtgcaactaccatctggatagtcgtacaattcgggttggcgataacgccgcgcggacgttccaatgcatcctctgcatttacttcaggcaccaccaaaggcacatcggcatccatacggaaagcgctggagttgtcgatcatcacagcaccatacttggtaattgttttctcgaactccttagatgttcctgcaccggcagaagtgaaagcaatgtctacccctttaaagtcatcgttgtgttgtaagagtttcacctcgatctgtttaccgcggaaagtatatgttgttccggcactacgtttagaaccgaacaaaactaactcgtccatcgggaagtttctctcatcgagcacgcgcaggaactcttgtcctacggctccgcttacgccaacaatagctactttcatctttttcttttgttaaattgtgaatattgaatttctcttcttatcctgtcgaatagaaaagatttggctgcaaaattataacaatttagcatataaacatcgattttgagagaaatatttcagtttttcggcggattactcatgcttccgtatagttggacgtggttattggagtgaaatgaccattagacattcattggattctgcaaacttttttgttcctttgcagaaaattcctaaaaaacacagcctatgaacctgtttgatctcaatttaacgctgccgatttctgatccgacctgggtgttctttttggtactaattatcattctttttgctccgatgattttggggcgtctccatatacctcatattataggcatgattctggcgggtgtcttgattggcgaacacggctttcatgtactcgaccgagacagtagtttcgaactgttcggcaaagtagggctctattatatcatgttccttgccggtcttgagatggatatggaggactttaagaagaaccggacgaaaagtttcgtgttcggctggcttacctttctgattcctatggtgttgggaatatggagtagtatgagtatgctgggatatggttttctcacggcggtattgttggcaagtatgtatgcttctcacaccttaattgcttatcctattattagtcgttacggactgtctcgtttgcgctgtgtcaatatcaccattggtggtactgctgtcaccgtcacccttgctttgattattcttgctgtcataggaggcatgtttaagggaactgtcgatggctggttctgggtatttcttgtggcaaaagtggctttcctcggatttctgattgtgttctttttcccccgtatcggacgctggttcttccggaagtacgatgacagcgtgatgcagtttgtatttgtgctggcgatggttttcctcggaggaggattgatggaatttgtaggaatggaaggaatcttaggagctttcctggcgggcttggtattgaatcgcctgattcctcatgtatctcctttgatgaaccggttggaatttgtgggaaatgcactgtttattccctattttctgattggtgtcggaatgattattgatgtaagaagcctgtttaccggaggtgaagcattgaaagtggctattgtgatgacagtggtggcaacctttagtaaatggctggctgcctggatcacacaaaagatctatcggatgcagtcgaatgaacggagcatgatattcggtttaagtaatgcgcaggccgcagctacactggcagcagtgttgatcggtcatgaaatcattatggagaatggagaacggttgctgaatgatgatgtattgaacggtacggtagtgatgatacttttcacttgtgtcatcagttctttggtaaccgaacgttcggcacgtcgttttgctctggatgaaaatgtgcaggcggaagaagaagctaagaaagtaaatacggaacaaatcttgattccggtggctaacccggagacgattgaagatttgattaatctggctttagtaataaaggatgctaagcagaaaaatgcattggtggcattgaacgttatcaatgacaataatagttcggagaagaaagagcagcagggtaaacgtaatctggagaaggcggctatgattgccgctgccgctgatgtgcctgttacgatggtgagtcgctatgacttgaatattgcttcggggattatccatacaatcaaggagtatgaagctacggatattgtgatcggtctgcaccggaaagcaaatattgtcgactctttcttcggacatctggccgaaagtctgttgaaaggtacgcatcgtgaagtgatgattgccaaattcctgatgcctgttaataccctgcgtcgaatcaatattgccgttccgccaaaggccgaatatgagtcgggattctctaaatgggtggaacacttctgccgtatgggaagtatcctgggctgtcgggtgcatttttttgccaatgagcgtacattgatgcgtgttcagcaacttgtgaaaaagcgacatgcaggtactccgacggaattctccatattggaggagtgggaggatctcttgctgttgacagggcaggtgaattatgaccatttattggtagttatctctgcccgtcgcggatctatctcttatgatccctcttttgaacgtctcccggcacaattaggaaaatatttctctaataatagtttgataatcctgtatcccgaccagtttggcgaaccgcaggaaattgtgtcattctccgatcctcgtggacataatgagtctcaacattatgagaaggtcggcaaatggttctataaatggttaaagaaaaactaatggaaagatacgactggcaacagagaacggaactcctgttaggagaggaaaagatggaacgcatccggaacgcgcacgtattggtcgtgggactgggtggagtaggtgcttatgccgccgagatgatttgccgtgcaggtgtcgggcggatgacgattgtagatgccgatacagtgcagcctactaatatgaatcgtcagttgccggccatgcattccacgctggggaggacgaaagcggaagtgttggcagcccgttataaagatataaatccggcgattgagctgactgtccttcctgtttacctgaaggatgaaaatataccggaactgctggatgccgataaatatgattttatagtagatgctattgatacgatcagtccgaaatgctttctgatttatgaagcgatgaaacgtcgtataaagatagtttccagtatgggagcaggggcgaagagtgacattactcaggttcgttttgccgatctttgggagacgtatcattgcggtttgagtaaggctgtgcgaaagcgtttgcagaagatgggaatgaaacggaaacttccggtggtattcagtacggagcaagccgatccgaaagcggtattgctgacggaggatgaacagaataagaaatcgacatgtggaacagttagttatatgccggccgtgtttgggtgttatctggctgaatatgtcattaaacgattataaggctattatgataaaactagaagggattacgaagagtttcggctcattacaggtgttgaaaggcattgatctggaaatcaacaaaggagaaattattagtattgtaggcccgagcggtgcgggtaaaactacgttattgcagataatgggcactttagatgaaccggacgcaggtgtggtacagattgacggaacaatggtgagtcggatgaaggagaaagaactatctgcatttcgtaataagaatattggttttgttttccagtttcaccaactactgccggagttcacggcattggaaaatgtgatgattcccgctctaatcgctggggtatcttcgaaggaggcgcacgaacgcgctatgaagattctggattttatgggactggttgacagggcttctcataaaccgaatgaattgtcgggaggcgagaaacaacgggtggcggtagcgagggctttaatcaacgatccggcagttattctggcagacgaaccatccggtagtctggatacacataataaagaagatttacatcaactgttcttcgatttgagagaccggctggggcagacttttgtcattgtgacgcatgacgaggggcttgccaaaattacggaccggaccgttcatatagtggatggtatgattaaaaaagattaattagagaacctaatttctaaaaatgtataccaaaaaggtagagccttgcaagtgttctatcttttagctatatatttatagtcgcttctctacggaagtctgtgaagatgatagtagagtgtttgttttgtttgtgtgtgatgcattcttgtctggtgtgataggaatgcatcttttttttattaattataacaaatgtagggctctagccgttcaagatcaataggagtgaactcctcatagagagataattgcttcagactttttaagaatcctttctttttccgatattctatgataacctttgcttggtagtagtttatgtatggatgatgcatcattcgttccatgccggctttatttacattgatgcggcgtgtctgatgggtgtcaatggaaaaccacggacggagtttctctgcctttagatgaatctcctgtaactgctctattcggaaaaagcctcccagccgttcgcggtaattcacaatcatccgggcaatgctgcttccgattcccggaatcttcttcagttcggtggtatctgcggagttgagactgatgacagttcccgggagatatttcacaagggtgtcccgttgtatgcttggtgcggttaacaatcgtaccgtgtctttatttgtcgaactgaaatcttctgtaatttgtatataaggacgaagagtctggtattgttcttccgtgagtccatatatctttcggaaatcttccgggtggcggaatttaccttgtttatagcgatagtgcaggatattctttatcatccaggatggtaatccaagcgaaagaaaagtagtggagtctgcggtgttcgggtcaaacatcgcaagcttgatttccctttgaggggatgattgaaaagaatgaccggacttttggtgaggtttggtttcccggagggaggaaataaagtcgttgtattccttatcgaacttctcgttctctctgcagtcggtatcttcagcgtgtgtgaaaaaggagaagagtttaggggcggcatatactcctaaaataagaacgacaaggacgataatgccttgtcgttctgttttagtataataaaggaagtctttccacattatagcttgattaatcccagttcattgataaatatcagtgagatggcgattggggcgatatattttaatataaagataatgagtttgtataccggtacctttaatgaaccgtcattggtaatctccgaccatacaatcttcttgtccagataccatccggtaaagagggagatgcacaatccgcccagtggtaacatgattttagctgttacaaagtcgaagaggtcgaacatgcccagtccgaaaacggtaaatcctttcatgactcccagtgataatgaacagaatattccgaggaagacacaaccgccggtgactaaccttgctgcttttccacgggagaggttgaactcctcatgtaaataagcggttactacttcgtgcaaggaaatagtagaagttaaagcagccattgccaacaacgcgtagaacatgacagagaatatatatgccagtatgggaactccgctaaatgcctgttggaatacattaggcagggtgataaagatcagactcggaccagaatcaggttgtatgcctacggaaaaagctgccgggaagatgataaatccggctagtatcgccacaaaggtatcaatgattcctacgctgaaagctgttttagtcaggttggtttctttgctgaaataggaggcgtacgtgcaaaggcatcccattcccagactcaatgagaagaacgcctgtcccatggcactcaaaaatacatttccgtccactttgctaaagtcgggcttgagcaggaattcgatacctgcaccggctcccggcagagtgaccgagcaaacaaccagtatgaggataatgataaacagggtaggcatcatgatcttggaggacttttcgattcctttttctacccctttcacaatgatgaaatgagtaatcagcaagaatgccaccaaccatacaaccggtctccacgggttactggagaactgttgaaaagaggatatgaactctccggaggtttttccggcaaagccattagtagcagcttcaaaaatatattcgagtgtccatcctgctactacagcataataactaagtatcaggaagcctgccaatactcccatgcgtcctacccaacgccaatgtgttccaggtgctaatttctgatacgctctcgctgtgttagctctcgaacggcgtcctatcaggaactcggcaatcataataggcaatcccagaagaagaatgcagcctaaatagatcaatataaaagcagcgcctccatggtttcctgtttcatagggaaacctccatatattacccaatccgactgcagagccggcagaagcgagtatgactcctaatttactgccgaagtttgctctatcattttttgccataaatcttgttttatcttacaaatcgttataaaatatacgtattagagcgcaaatatagaaaatgatacttatatttgcacgaaaattgtaatattatttagatatgctatcttatattaagaaatatccgatctcgctttttatcattctgacagtgatttatctgtcgttctttaaaccgcctaagacggatttagatgaaattcccaacttcgacaaactggttcatgtttgtatgtattttggtatgtcgggaatgttgtggctggaatttttgcgtgcacatcgcagggacaatgctccgatgtggcatgcatgggtaggcgcattcctttgccctgtactttttagtggttgtgtggaattgttgcaggaatattgtactacttaccggggtggagactggttggattttgcggccaatacaacaggggcggttctggctagtttagtggcctattatgtcgtacgaccgaggatgaaaataaataagcagtaaaaggcaacctatgaacaacaacggtgaatgataaacggtgaacggtaaacggtgaataatggatatgatatagtcaaccattattcaccgtttaccgttcaccgtttatcattccggctttatagaaattctaccgttgaactaagtttgattccattggaacctttaatgagaatagtatatcctttgggtttatcttcttgcaaatcctttataacttcctgcacatttgcataagttttaaaagaatgttcacttgcggcaaactgttctcccacgagccatactttctcaaaattactttctttgatgtagtcaacgattttctggtgttcggccgggctatcagcacccagttcgcgcatatctcctaatatgagcatcttgtggggaactgtcatattccggaagttttgcaaggcagccatcatgctggttgggtttgcgttatatgcgtcgatgataagcgtgttattttctgtctttttaagttgggaacggttgttctgtggcgtatactctgccagagctttatcgatcttctttgtttccactccgaagaaacgtccgatagtgattgcagccagggcattggggaaattatattctccgatcaattgtgtacagacttgatgggcttcaccgtctttaccggctttccattcgaaagcaagataaggcgaattgccggtaatccggccattgacatagagatcatcttctgttccataagaaatcaggttcagtccctgtgagatattcatcaaataggggttatcgtgatggataaaggtgatggcatctttcttgcggaggaaatcataaagctctcctttggtcttgataactccttcgaaagaaccgaatccctccagatgagctttgcctacgttagtgataataccataatccggttcggctatttcgcaaagaaacttgatttcccccggatggttggcgcccatctcaatgacggcaaggtcatgttccggttttaaccgtagcagggtagtcggtacgccgatgtggttgttgagattacctaaagtatagagtacattgtgggcttggcagagaacgctggaaattaactctttggtggttgtcttcccattagtgcccgtaatgccgatcactcgcgttccgagttggcggcgatgatagttggcaagctgctgcatggtttgcaggcagtcgtctacaagtatatatcgttgatcgccttctacggcatactgtatttcatcgataatggcaaacgcgcatccggagtccagtgctaatttggcaaatgcattaccgttgaacgactcacctttcaaggcgataaacaaagaaccgtccggacagttccggctatcagtagttactgattggcaatccagaaaaatctggtaaagagcagaaagtttcataacctgatcttttatttaaaacgttgcaaagataggctattctttcggatttgatgggagttcgggcagttttttgtttaggcatatatcaaaggaagagtcaggatcatccggcatccttctgtgtaagaagtgtcgattcggaggctgcctcctaacttttcggcaatactccggcatatcggaagtccgagcccggtgccctgcgtgaaagagttcattttgtagaaacgttcaaatactgcttcctgttggtctttcgggatgcctgttcctgtatcggtcacactgatttcaattttcttttcagcttccaatacggaataaacgatgcgaatactgccatgagtcgtaaatttagcggcattatgtgccaggttgttcaatacttgtgatatacgttccgaattactgcgtatgagcaggctttctctttcaggttcgaataaaacctccacatctttctgcgtgttatctttggcaacttcagatgcaagttgacagatcgcatgaaggtctgtttcggcgtcagtgggcagttgttcatattgatccagttcggacagcgtgagcacatcagtcaccagtcgaagcaagtcgttactgttgcttttgatgatattgacaaactcctgtgtttccggactattgctgtaatggtcgcttaatacttgcgagaagcctacgatagagttgagcggcgtacggatttcgtgcgtcatgctttggataaacgtcgttttcatccggctgcttgcctccgctatatctttggctttacgcaattcttccctcgataccataagttcttcattccttgttttaagttcggcctctgaaactttcagtttgcgtttcaggaaattttctctataaaggaatatgaataagatacctaataaaataatcaatgaaataatcaaggttgttttattatgcaactccttctcttgtgcttgaagcatgagttctttcttttcggcattgagcttttctacatttaataaggtggcgaattcgctgctggacacttgttcattggctattttcaaagagtcatccgtgttgatgtacatttgcagatatttgaccgccaggttcatatttcccatcttttggtagatttctccctgtgtgcggtaatggatgctgctaagtatgctttcgcttaaacgacgttcttctttttcctgcatctttgcggcttccagcgctttctgatattgtttggtctgctggtagtataaacattctatattatacagtctctttttgatagactccagtcttttgtcctgttcaaatgccgcctgacactccttcagtaatttttcggcagcttgaaagtcgccgaacttgctgtagtagtttacaaattccaacttggcagatatttgttgcgtagaggaattggcagtcgcaatggctttttccacagcagctaatgcttctttttgctttttctggttgatgtaatagttggctatctgggcataggtctgggagatgttgtagttttcgatcttgtatttttcagtcagttcgatttctttcaatcgccactcgaacgccattgaatcgaatcttttgatggtgtagatttgcgacatgatgttatagcaacgggagaggccggtcttatcatcctcttcttgagcttcttttaacatgttttgcacttcataaagtgctatgtttgttctgcttgtttttaggtaataggtgattaatctgttcgcccatgcgaagtaatagtatttaggctgatgagtggccttggcgaattcttttactttgttggtatagtggattacgctgtcttcattggttccctggaaataataataatccagttgagtggctatggctactgcctgcattcgttcgtcctgccgttcgccagccattcggaataaagtgtcggacatattaagtacaacaggctctaacaagtattcttgacaatgttgataatattcatagagagtagagtcaacattgaaggtttcagcctctttttgagctttagcagtagtggtaaagaacaaaatgaggaaaagaaatcctacgcgaaatagggttaatcggctcatggtatgaatttttcgggttcttctatagtttgcaaatatacgtttatttcttctttttagtacgaatacttgctttttttatctacatttgtaggcgatctaaaaggaatgttgtcaatgatgaaacctatatctcctatttatataaatgtaaaagggcggttgctcgatcttgctactccgcaggtgatgggaattttaaatgttactcccgattctttttattccggcagccggatgcagactgaagaagacattgctgcccgggcccggcagatacttgatgaaggtgcttcaataattgatataggagcctattcttcacgggcgaatgccgaacatatttctgctgaagaagagatgcgaagactgcgcaccggtttggagattctgaaccgtaatcatcccgaagccattatttccgttgatactttccgggctgatgtggcggaagaatgtgtgaaagaatatggagtggctattattaatgacatagctgccggtgaaatggatcaccggatgtttcagacagtagccgacttgggagtaccctatattatgatgcatatgaagggaaccccccaaagtatgcagaaagaaccgtcttatgataacctgattaaagacgttttcctgtatttcgctcgtaaagtgcagcaacttcgcgacttgggagtgaaagatatcattctcgatccgggattcggattcggaaaaacattggagcataattatgaactgatggcgcatctggaagaattccacatattcgaacttcccgttttagtgggagtttcgcggaaatcaatgatttataaattattgggaggaaccccgcaagattcattaaacgggacaaccgtattggacactgttgcgttaatgaaaggagcgcacatcctgcgtgtacatgatgtgcgtgaggcggtggaagctgtccggatcacagagaaattaaaaatagagagtggatatgacaaataagaggagggtgcatgttttttgagtttggtataaaagattttatcgatatcctgctggtagcttttgttttgtactatacctacaaactgatgaaagcttccggctccatcaaggtattcaccggaattttggtttttattctgatttggctggtggtgacacaagtgctggagatgaaactgttgggttctattttcgacacattgatgaatgtgggtgtaatagcgttgattgtgctttttcaggatgagatacgccgttttcttttgactttgggatctcatcggcatgtcagtgcattggcccgtctctttagcggatcgaagaaagaatcgttgaagcacgatgatatcatgcccgtggtaatggcttgtttaagcatggggaaacaaaaagttggcgcattgattgtcattgagcataatactcctttagatgaggtcgttcgtacgggcgaattgattgatgcggcaatcaatcagcgtttaatcgagaatatctttttcaagaatagcccgttgcacgatggcgcaatggtaatcagcaaaaaacgtatcaaggcggcgggatgtatccttcctgtttcccatgatttgaatataccgaaggaacttggcttgcggcatcgcgcagcgatgggaatctctcaacagtcggacgcacatgccattattgtttcagaggaaacgggcgctatctccgtagcctatcgcggacaattctacctccgcctgaatgcggaagaactggaaagtctattgacaaaagaaaactgattttattgtaatcacataccggacaaatggtcggaagatgagcatggtaaaatgcctctcatcttccgaccattgttgttttatctgctatttggcgctttttgctttatttccaaccctttttgaatgataattatgccctcctttttaggtgaatcgcctacctttgccgtatactattaaaattctatttttgaataaaccatgaaaaacagattgattgctttactggtactttttacagttattttctttagtactgcacaggcgcaaactactgcacggaagtttgaggcaggcaagaacacattcttgctggatggaaaaccgtttgtggtgaaggctgccgagttgcattacacccgcatcccgcaagcttattgggagcatcgcattgagatgtgcaaggcattaggcatgaatactatttgtatttatattttctggaatatccatgaacaggaagaaggaaagttcgatttttccggtcagaatgatattgcagctttctgccgtgcggcacagaaacacggtatgtatgtcattgtccgtcctggtccgtatgtatgtgcggagtgggagatggggggacttccctggtggctgttgaagaaaaaagatatagccttgcgtacgctcgatccctattatatggaacgggtaggcatctttatgaaagaggtcggtaagcaactggctccgctgcaagtgaataaagggggaaatatcatcatggtacaggtagagaatgaatacggttcttatggaatcgacaaaccttatgtctctgccgtgcgcgacctggttcgtgaatccggttttaccgatgtacctctgtttcaatgtgactggagcagtaacttcaccaataacgcgctcgatgacctgatttggacggtgaactttggaacaggtgccaatatcgaccagcaatttaaaaaactcaaagaacttcgtcctgaaactccgttgatgtgtagcgagttctggagcggatggttcgaccactggggacgcaaacatgagacacgtcctgcaaaagatatggtacagggcatcaaggatatgctcgaccggaacatctctttcagtctgtatatgactcacggaggaacgactttcggacattggggaggtgcaaacaacccggcttattccgccatgtgcagctcatacgattatgatgctccgattagcgaacccggatggacgaccgataagtttttcttgcttcgtgacttgttgaaaaactatcttccggcaggtgagacgttgcccgcagtgcccgcagctctgcctgttattgaaatccccgagtttcacttccataaagtggctccgcttttctcaaatctgccggaggcaaaacaaacggtggatattcaaccgatggaacaattcaaccagggatggggaacgattctgtatcgtaccacattgcccgaaacgactcttgcaggcaccactttgaaaattacggaagtgcacgactgggcgcagatatatgccgacggtaaactgctggcacgcttggaccgtcgtaagggagaatttacaacgaccctgcccgcgctgaaaaaaggcatacaactggatattcttgtggaagcaatgggacgtgttaactttgacaaatccatccacgaccgcaaaggaatcactgaaaaagtggaacttatttcgggtaaccagactaaggaattgaaaaactggactgtatataacttcccggtagattattcctttataaaagataagaaatatagcgatacaaagatattaccgactatgcctgcctattataagagcacctttacactggataaagtaggagatactttcctggatatgagtacatggggaaaaggtatggtctgggtgaacggtcatgcaatggggcgtttctgggaaatcggtccgcagcagactctctttatgccggggtgctggctgaaagaaggagagaatgaaatcctcgttctggatttgaaaggtcctacccgggcttccatcaaaggtttgaagaaaccaattctcgatgtgcttcgtgaaaaagctcccgaaacacaccgcaaggatggagaaaaactgaaactgacgggtgagaaagtgggccatgaaggagctttcactccgggtaacggctggcaggaagtgcgatttgccactctggtgaaaggacgttatttctgtctggaagcactttctccacaagcaaatgataacatcgcagcgatagcagagtttgatgtcctgggagctgatggtaaaccggtatcccgcgaacattggaagattcgttatgccgatagtgaagaaacgcgtagtggcaaccgtacagccgacaagatattcgacttgcaggaatccactttctggatgacagtggacaatgttccttatcctcatcaattggtaattgacttgagcaaagtggaaaatgtgaccggtttccgctatctgcctcgtgccgaaaaagggtatccgggtatgattaaggaatatcgtgtatatgtgaaacctgctgatttcaactactaaacagtgaatgaacaagaataaaacaatggatgaaaaagcattgaaatgatgatgaatatgaagaaaaatataattcttttcgcattcctatttgtgggagtgttgactgggtattgccagcaatctgcttacctgtttgtttacttcaccggcaatcgcatgagtgaagaagccgtccggatggctgttagcctcgatggatataattataaagccttgaatggaaatcagccggtacttgattcccgtgtgattagttcaacaggtggagtacgtgatccccatatcttgcgctgtgaagatgggaagacattttatatggtggtgacagatatggtgtccggcaatggatggagttctaaccgtgccatgatattattgaaatcaaaagaccttgtacactggacttccaatatcgtgaatatccagaaaaaatatcccaatcaggaggatctgaaacgtgtgtgggctccacaaactatttatgatagggaagcaggaaagtacatggtttactggtccatgcaacatggcaatggtcccgatatcatttattatgcttatgccaacaaagattttaccgatatagaaggagaaccgaagccactgtttcttccggaaaataaaaaatcatgtattgacggcgacattatttacaaagatggactctatcatttgttctacaaaacggaagggaatggaaatggaattaaaaaggccactacctcctctctaacctccggccaatggacagaatcggatgactataaacagcagacgaaggatccggtagaaggttcgggtattttcccgctggttggttccgataagtatattttgatgtatgatgtatatacgaaaggtaaataccagtttaccgaaagttccgatctggaacatttcaaagtgattgaccatgctatcagtatggatttccatccgcgccatggcactgtcataccgattaccccaaaagagttgaaacgcctcttcaaggtctatggtaaacccgaaggtttctgaactaaaatatctcgtgggacaggagaaaaatacctgtccctgatttgttaaaccaattgtttttcaggcgggtaatcttcgcttcccagtgagtattcccatccttttgttttcttttgagttattctgataagatggattcaactagttgtaatccaggaaaacagtatacgatatggggaaaagtgtatattctacccttgtttacttgtttcttatatatttttaagtgtataattaccaattattatatgaaacacgcttgttagaatgatgaaaatcttaactttgcgattgataatcttaatgcaatatataccatgagaaaattattcctctttttagttgtcttgtttttgtcgttccagcagctcactttagctgcaatcaaagaaatgacgagtacacccgattcggtttatctgttttcttttgcaacttccggagacgacggacgcagcggactccgttttgcctggagtacagataaagaaaactggtttgaaattggccggaactacggatatctccggtgcgattatagccgctggggatcacagaagaaaatgctcgatccttatttgaaacaatcgcccgatggcgaatggatttgtacctggaaactgaatgaccatgatggatacggccaggctacttccaaggatttaatcaactggaccagtcagaaatatccccgtactacgccggattttgacggagtgagagtgaaagctattgttgccggagaagagcagaaaggaaatatcaaccgggtagcttggaccttggtggatggattggataaaaattatggctggaatcaatatcggaactcattacatggagaacgtccggtacaggatggagaacgttttgccggtttgaagcctgtaaaagcaacggtcactgtacaaccggaaggcgcaaaagccattagtgatgtattgctgggcgctttttttgaagacatcaattattcggcagacggaggactctatgcagaacttatccaaaatcgcgacttcgagtacgacccttcggacagggaaggagataagaactggaacagcactcattcctgggcactgaaaggagagaaaacgactttcactattgatactaccgaccctattcatatcaataacccacattatgccgtgctgaatgtagaacaaccgggagctgcattagaaaatacaggttttgatggaatcgcactgaacaccggagagaaatatgatttttccatcttcgcccgggttccgcagggtaaatcaaataaattgcaggttcgtctggtagatggaaaaggaaatgtgtgtggagagacttctctaacagtgtcttcccgtcaatggaaaacatataaagcggtgataactgctaaagctactgcggacactcatctcgaaatcatccctcaatctgttggtgaattgaatctggacatgatttccctattcccgcagaatacatttaaaggacgtaagaacgggcttcgcaaagatctggctcaagtgttggctgatattcatccccgtttcatccgtttccccggtggctgtgtggctcatggtgatggcttgaaaaacatttatcaatggaaaaatacagtaggtccgttggaagcaagaaaagcacagcgtaacctttggggataccatcaaagcatgggattgggttattttgaatatttccagttttgcgaagatattggtgcggaaccgcttccagtgctggcggccggtgttccttgccagaactctgcctgtcacggcgacttgagaggaggacaacaaggtggtatcccgatgagcgaaatgggagcttatattcaggatattcttgatctgatagaatgggcaaacggtgacgctaagaagaccaaatggggaaaggtacgtgccgaagccgggcatccgaaacctttcaatctgaaatacatcggtatcggaaatgaagatcttatcactgatatcttcgaagaacgcttcacaatgatcttcaatgccatcaaagaaaaatatcctgaaacgattgttgtcggtacagtgggaccgttcaatgagggtacagactacgtggaaggatggaagctggcggacaaactgggtattccgatggtcgacgaacattattaccagactccgggatggttcctgaacaaccaggatttctacgacaaatacgatcgttcgaaaaagacaaaagtatacttgggcgaatatgcaactcacataccgggacgaaaggcgaatatcgaaacagcactgacagaagctctttatcttgctgccttggaacgtaatggagatgttgtacacatgacttcctatgcccctcttctcgctaaagaaggacatactcagtggaatccggatttgatttacttcaataaccgggaagtgaaacctaccaccggctactatgttcagaaactctacggacagaatgccggaaacgaatatttgccgtcaaagatcactcttgataatagagacgatcaagtgcggaaacgcattgccgcttctattgtccgtgactcggcaagtggcgacgtgattgtgaagctggtcaatttacttcccgtagaggtgaatacgaatgtcgacctttccggaatcggtgctatacagtcttctgcaaaaagaaccgtactgaccggcaaaccggccgataccccgctacctgttgaagacacaatggaagtagcagaaaagtttgactatcaattacctgcctattcttttacggtgatccgcataaagaaggcaaatgagaaataacagaaaaaagtgaagataataacgacataaataatatgaagaagataataagtaccctgctggctagttgctgtctgacttctctgatagcacaggaagtggtagtgaaagggccggatgaaaaactgcaattggttgtatctgcttctccagccgaaaagccaagttattcgattacctacaatggaaagacaatgttggagaaatctcctttgggtatgaatacgaatatcggtgactttgtaaaaggaatgaaactgacaggacacgctgttactccgattgacactgtctatcatcaggatcgtattaaaacctccaaagtgcattatcaggcaaacgaactgatttgtaattttgagaattcgaaagggcagaaaatagatgtagtctttcgtgtcagcaatcacgatgtagcttttcgctatactcttccgcgtcaggatggaaaaggaagtgtaacggtaactgccgaagaaaccggctttcgctttccgcaacaaacaactactttcttatgtccgcaaagcgatgccatgataggttggaagcgtaccaaacccagttatgaggaagagtataaggcagatgctcccatgagtgaccgttcgcagtacgggcatggctacacgttcccttgtctgttccgtatcggtgacgatggttgggtattagtcagcgaaacaggtgtagacagtcgttattgcggttctcgtttgagcgatgtaagcgaaggtaatctgtatacggttgctttcccgatggcagcagaaaataacggtaacggaacttctgctccggcgtttgcccttcccggtgctactccctggcgtaccataactgttggcgaaaccttgaaaccgattgtggaaacaaccgttatctgggatgtcgtacgtcctctttatgaaacgaagcatgactaccgtttcggacgcggcacatggagctggattctctggcaggatggtagtattaactatgacgatcaggtgcgctatattgattttgcagctgcaatggggtatgagtatgccttgatcgataactggtgggatacgaacatcggccgtgaccgcatgaaatctttgatagaatacgcacgaagcaaaggagttgaactcttcttatggtatagctcttccggctattggaatgatattgagcaggggccggtgaatcacatggacaatgctattatccgcaaacgtgaaatgaaatggttgcaaagtcttggagtgaaaggaatcaaagttgatttctttggtggcgacaagcaggaaacgatgcgcctgtatgaagatattttgagtgatgctgacgaccacggtctgatggtaatcttccacggttgcaccatccctcgcggatgggaacgtatgtacccgaactatgtaggcagcgaggctgtactggcctccgaaaatatggttttcggccagcacttctgtgatgaagaggctttcaatgcctgtctgcatccgtttatccgcaacgcggtgggttgcatggaattcggtggttgtttcctgaacaaacggctgaatcgcaacaatgacggaggaactacccgccgtactactgatatatttcaattagccactaccgtattattccagaatccggtacagaattttgcgcttgctcccaacaacctgaaagatgtttcccctgtttgtgtggactatatgaaaacggttcctaccacgtgggatgaaacacgtttcattgacggatatccgggaaaatatgtggtcttggcacgtcgccacggtgacacctggtatctggctgctgtgaatgccgggaaagaaatcgtaaagttgaaactggatttagatatgtttgccggaaaaaccgtttctctgtataaggatgataaaaaaggagaacctcaacttgtgacgttgaaagtaaaagaaagcggaaaagtgcaactggaaatccttccacagggaggtgttgtattggtgaacaactagatgatatttcttttggatgtggaggttgtgtcaaaacgctgacacagcctttttttatgcgcaaagcccagactttctcaagcccgggctttgttattacccaaagttttcgtatctttaggtataaagtttttcgttatggcaaagttacattttcgtccttacattcccaaccaaaccgttctttttccacaaagaattgatgaaaacatagctgcgaccgacccggtccgcatcgtgaatgctgttattgacaatctcaatcttgagagtttcaagaagctttataaggaaacgggccgttgtccttatcatcctaaaatgatgcttaaggtgataatctacgcctacatgaataatatctattcttgccgtaaaatagagaagtacctccttcgtgacattcattatatttggcttgccggtaatgagcatccggattttatcacgatcaaccgttttcgcaaccgtgtaaaggaggaaataaataatgtatttacccagttggttcttgtccttgccgataaaggtttcatcagccttgatgtggagtatatcgacggcaccaagattgaatccaaagccaacaaatatacttttgtctggcgcaagacagtcgaacggaaccgtacgatactaatggataaaatccgtattctcttggagcaggtggatgaagccattgcacaggagaactctataaaagacacatccgtggagtttactccctgcaggctctctgacatagtggatgaacttaaagaagccctggaacaccagcctgcaacaaaggataaggaagaaaagaaagccctgcgcaaaaagaagaagcaggtcatggaacttgaagggtatcgtgacaagctgatagaatacgacaatcaccttgatacccttggagaacgcaactcctattccaagaccgatcctggtgccacattcatgcgcatgaaagaagatgccatgaagaacgggcagaccaaacccggatataatctgcaaataggtactgaaaaccaattcatcacagacttccgtctgtttcccaaccctaccgatacactgaccctcataccttttttccactctttccaataccgctataaccgtttaccgaatatctgtgtggcagactccggttacggttcggaagaaaattaccggttcatgcaggagaatgggatagaagccttcatcaagtacaattacttccataaagaacagcgtcctcgttatactcccaacccgttccatgccgaaagtctccattacaatgcccaagaggattattacgtttgtcctatgggacagcacatgaaccgtataggaaccaaacgtgacaagacagcgagcggatacatcaccgaaagtgcccggtataaagcaaaaagatgcgaaggttgccctttgcgtggcagttgttttaaagctcgggggaaccgtattatagaagtcaaccaccgattaaatcaatacaaacggcaggcacgggaaaggttgctctcagaagaaggtatcaagcatagaggcaggaggtgtatagaaccagaggctgtgtttggacaaatgaaatacaacatggcatacagaagattccggcatgtgggagaagacaaggttacaatggactttgctttctttgctatagcctttaatatcaaaaaaatgtgtgctaaactgataaaagaaggaaaggggctcattacagttgccaaatatatgtttatgggactatttataacccgatataattggaatatagcaacttgttgccaaatgcatgaggaaaaagcagcatagccaaaagaaaatatagcagaactgtaaaatataaaagaggttgtgccaacgttttgacacaacctccacatttttatttgttatttacttgtggcttggtggcaacagtatttattgtgcaataaataactgctgtgtatgaggaaaataaacgatttttttgttgctcttttagcgtaaagatgttatcttcgtttattgttcaaccttaaaacggaaaaccatgcatacaaaactagtaagtcttttcatagcgttgtttctgtgtttgccattgtttgcacagaaagagtcagtccccagaatagatagtgagggagtttatttaattcccgatgagatgccgaagtttccgggaggcatgcaagccatgatgaaatacttggcaactaacgtaaaataccctgtcgaagcccagaagaaaggagtttccggtcgggtgattatccagttcgtagtgatggaagatggaacaccgggacagggaaaggtagtgagaggagttgatcccctgttggatgaagaggctttgcgcgtggtgaaaacaatgcctaaatggtcacccggaatggcggatggcaaggctgtcaaagtgcgtttcactattcctgtaatgttcagcctgtcgaaaaagcaaaatggcaatactccgaatatgaatattcctgaacttactgtccctagcggtcaggaagtcactaataagagtctggagggagtatggcaaagctgtcttgtgcagcccggtgcacatgattttcggattgcattattaccggtcttaaaagtaatttctgccgataaaacatttataaacatcatgacacgtggcagggatgcgaaatcgaatgccattatattttcccagggagagtatcgtttgccttcagacagcgtgtatgtcgagatattgggaaaatcgtccgatcctgttttcgttccgggaacagagaatgaaattagtgttgaacgtctccacgacaatctgattaagttatcgttctcaatgcccgataaagaaaaacgatgggtggagtattggttccgtgttccgtcgcctgatgtgaagataatggctgattgataatttctctctgtatagatttgccattgttgaaggaagagtacattcgttttagaagacttatttgaaacgatagttcccggaaagttccgttttgaatcgttgcgggatcttatggaaattcaagaaaatacccttcacctttcacaatgccctattcatcggcattagcgggtgaagggcaggctttcactttcctttcacctttctaccctggttttcacagattgtctagtctgctaaatcttttatctatagttggcagaagaagtgttagcagatagcttccagactattataggaaaacttcttttctataagggataaacttcctttgtataggaaccaaactttctttgcatcataagaaaactataaatgcaagctttgattatataaatgaaacttgcatttttataatcaaagcttttgtttttataaacgcaacttgcaattatagattgcatttaatgaaaaacaagtttacatactggtaataagaagtttaccagtaatcaaaagaaagtttgttattaatgaaaaagaagttagttagtaatgagtgggaaacaggttagatatgtttttagaagtaacaggtggagaagaattatacagggttaagaaaacggagggtgaaaggcggatgaaagagcagccttcacccgctaatgccgatgaataaggcattgtgaagggtgaaggctgtgtttgtaaaattggaaaacaggtgttagagggaaatttaccgattggttactgtttatttccccagtgtgagatggtgggaataaagttgaaactttataattttaagtctactctctttcccctataagaaacagattgatcgaatgtcgtagcatcaccgtcaccacaaccttttcccggttctacaatgataatgttgaatttacgatttttcagcattcctttgtagttaccttgccggtcgttaatcgtcagggtacagtctttatcattccatttcatggcaatggtagtgtatgctcccttttcgtaattgtagttgtcgaactcatcttcgtaaagagtaaattcagcgtcggcgcccggataaatgcgaagtgtcagattatcccatttcttttcggtggaatattgtacagccggtccccagggtaggatagaaccagcacggacatagacaggcatgatgtcgataggcacttcacgctggatggtttgtccgcctttcaggcttttcccggtccagaaatcaatccattgggcacctgcgggtagataaacatctgtctttcctatcttattcatattcttctgatagccgttctgtttgtcgtcctgccatgtataaagcgaatcagttacggggcggacaaggaaattacggccaaacatatactctgtatccatctcgagtactttcttatctttaggaaaatccatcatgagtggtcggatgatactgcccgctttgttggtaacttcccatgaagtgctgtagagatagggcaaaaggcgatagcgcaggtgagtatatttttcgagtgcgtcataagcccagtctcctttcttgccgaactggtatatttccacagctaccggactggaattgtgtgaacgcatgatcggctggaatgctccccactgataccagcgcacgtgcaattcatgataagcgatattgtgtacattattgttatatttccgtgcgaagaagccgcctaggtcggtattccagtatggtatgccgcatagtgagtaatttagtcctgccgccagttgtttcttcatcacttcccaggtagagactacatcaccgctccatgaatgtgacgcataacgttgctgtcctaggaaagacgaacgtgtgagcaggaatacccgcttgtcggaagtggtagcacgttgatgttcgtatacacccttgttggacatcaaagggaaagcgttgtgcactctgcggaatgaacctagataagtgggggtgtcgaaatctttgtccttgatttccagatgatccggctcggtagagtcgagccaccaaccatccataccgagatcgaagatgttctttttcatttctgcccaatacatatcgcgtgctgtcggattgaacgggtcgtaaggttttactccggctttgggaggccatgtctcgaagtgaagcaatgctttcaggctatccattttctggtacatctctgtccacggaccgaacgaggcccatactgaaatcatgatatgtgcattctgtttatgtacatagtcgatcatttctttcggacttttgatgcgtagcgttccataattagcatttctgtcttctccgttcgggaggaatttcatgtattccggatcacccattttgttgatatagcgtgggttttggaatttcatcgagttccagttttcgttgcatccccaatattgccagtcttggatgataccgtccaaaggtactttcagttcacggtacttatctactacttcgcagagttcgtccggacttttatagcgttcgcggcattgccagaatcccagtgtccagagcggatagagcggggcctgaccggtcagctcgcgcactccggctattacaccgtccgcattgccgccgtaaatgaaataataatcagcgcaatcgcctacttccgagtcgaacgacatctcttgcggattgtcgaggaaagtagtaggagagtaattatcccaataaagggcatatcccttgacggaatgaatgaatggaatgcagatactcatattttgattgcggagaaacagtttctgattgcgttggttcactttacccgtctgctgctgtcccaaaccgtagattacttcgtctttatccagcaaaaaggcctggcggacattgaaagacggaacacctgcatcattgaaaggagtgaattgtgttccgtaatccttgtccgtcaacagacgttgcccggacgaatcgaaaaaatggataccaccagtctccgggttcacttccacttggataagacggctgcttaatgtcacatttttccccttttcaccgaaagaaacaggagttgtctcgggcgttttgacaatgaccagactttctttattgcaagatttctgactgggcgtcttataaaccctgacaatggagggtgaataaaactctacgttgacatccatcccctgtgtggcacacttgatgccttgtgaggtacgctgtacattttgtgctgtaccattgcctgctgcaaccattgttgcacatacaagcaagaaaccggcttttctaataagattcattttcatggtttttaagtactttatgatgcagcaaaagtagggcagaggcaagcaaaacggacaacaatcaggttgaaacaaacagtaatcacgttgatttcttcgctttttcggcatattctgacgggcggcatccatacatttcctgaaaacatttgcttaaataactggaactgctaaaacctgtgtgttccgcaatttctgtaatacttagcttgccctctgttatcagttgtgctgcccgttgcagacgaatgttacggataaagaggctgggagactgatcgagcatagtcaccagtttgcggtataatcccgttcgctccatacagaggtcgcggcttagttgctccaccgaatagccattgacgtgcagattctgttccaccagtttgatggcttgtgccagaaatgcagattcttctgtgtcctgttgctgatggtcgggagacgtttcttctatgtcacaggttagagaattattttgttcgatcaggttgcggatacggagtaatagaatctcttctttatgcttgcgttccatttcctttctgctccaatagatatacaatcggctaccggtgaaagcaatcagtaataaaatgactgcatacaggatataagccgtggttgttttccaccacggtgcatggatggttaattttattgctgtcactttgccgttccactgaagaggattgtccgaggccatgactttgaatgtataatctcccggtggtaaattggtgtaaacagcttgaagaagacctttccctacagtcgcatttccctgtcttcctgcaaatgtactcatccattgcgggtcgataccttccagttgataacggtagtatgtgcgttcatgattgatataattcaatgccgaaaattcgaaagtcaggaagttttggttatagtccagttcgatttcggttgcataaggagcagccttggacaggatgatgcggttgccatattcttttccagtattcactttctctccatacaagcgtaaggctgtgaaaaccggcggatcaggaagcatcggatgaatggagtccttgtcgggatggaatatgctaaagccatcaataccacccagatagagagtaccgtcggaagaactgaatacggcatcttttatgtattcgccgtccaaagcaccgtccaactgattgaaccgggtgaaactgatgttcttattctccggatttatgtggatgcgtgtgacaccgttactggtcgttacccagatgtctcgatatttgtcctcaataatgccctggataaagttattgctcaatccgttttcacgatagaagatacgtggggcagagtcgttttcgctggtaaaaagttccagtccgtcaggagttcctgcccatgtccatccgcgtgtgtcggtatataatgtattgtatactttatttttgaaatgatggttcttgttggggttcaaccgattcagtatttcaggagagacagacgggatagctgctgactttaatacataggatttttgttcattagctgtcagtcgataaattcgggaatgagctttcagatagatatttccatctttatcttcggcgaaagattcaatattgatttcttcttccggggagacgggaaatgcattgcgacctatatgagtcagtttatgcatggacgggtgatgatataataatccccgattgaaagttccgagccataaccctccttgtcggtcttgaaagacagtgctgatttcggtagagacaatctgtccgtttccggtttccaatagggggatgtatttttgtgttcctgtgtggaggtcaatcatccaaaacccgtgaacgcaactgatataggctttctcaccattaggggtaatgataagggtgttgagagtatagttctgttcgaagagttttttccatgtgcgcttgtggctattgaaatagaataaaccgcctttacgcccgttgcgtagttgatagaagccgtctgcgcttttgacgacgagagaagtattttgatattcagcctgttcggatgcaggataagcggctatgttgtatacggttttttggtcggctatgtggtaacaggacacttcgcctgtgtcatagaataaatatagggaggtactgtcggcattcaggtcctgcaatttcccggaatacttgccgggcaaggttatacgggtcttgttgtttaattccagtaattcgttagctatgagtagccagatgtgtcctgaatcgtctacaaaaaggtcttctacgggggcttgtatctctctgttcttaaagtaagcatctaaatcaggaatgtattcctctctgtacaggtcaatgcacatcagtttgtgagtatctttaatccataacagagaatccccactctggtaaatgtggtaatgcccgttatattggtttaatggatatacgtattccgtggtgcggtgaagatagctgaaatgtacaccgtcgtatagatttacattaccgctggtggtgaataccattcttccgtcgggcaactggaggatataacgtatttggttatcactcaatccttgcgacgcattgatggtggtgaacaggaattcaccggcatatatgaacggtgtcatcctgaaacagaaaaataagcagagcagaatccgtatgtttctcaaactattggtagtcatggctatgtttcaagattacaaagataaaaaaagtcggcttatgaagcacgacttttctatctgttaaaggcagttatttatcattcagctgataaaaagtggcatcttgacttaattttgggcttttatgaatgatattcagacgaatgtttgtatataaagctttacttttgcgatgaatctgacattataaacatatcattaccatgaaagcaatatttgcattatttttattgtttgctattttatcattaaaactctctgtggtctttgcgcaggaaaacatattcaccgtctggcagccggattatcagaaaagcccttatacgggaatgactcgtcagcactggatacaggcaggcgagtatttattaaaaggtgcatttaactatatacatacattagacgatcaaatgtattttccgaaacagctggataaaacatatccgagaaatacgggagaaattccggtagcaaagctggaaggtctggcacggactctatttgtagctgctcctcttttgaaagataatccagaactggagatgaacgggataaaagtggcagactattatcgttatcaactgataaatatctctaaccctgaaagtaggagctatattccgcatcgtacgggaggtcccagtcagacattgttggaactgggctctttggcaatctcgatgaaagctgcacaggaagtgttatggaatcctctcactaagaaacagaaagattcactggctgctaccatgttgagttatggagagggaccgactattggttccaactggatgtttttcaatgtctttatcttgagttttctgaaagatcagggatatgccgtgaatgaaagctatctggagtcgaacctgcaaaaacttctcgcacgctatcggggcgaaggctggtacaatgacgctccggcttatgactattatagtgcgtgggcttatcagacttacggacctatttgggcggaaatgttcgggaagaaacaataccctcaatatgcaaggctgtttatggaaaatcagcatgacatggttgataattatccatttctgttcagccgtgatggcaggatgaatatgtggggacggagtatttgttatcgttttgccgttactgctcctttgtctttgtatgaatatgacaaaagtggtaatgtgaattatggatggatgagaaggatagcttcttctacgttgttgcaatttttagaacgtccggaatttctggaagatggtgttccgacaatgggtttctacggaccttttgctcctgctgttcagatttatagttgccggggtagtgtttattggtgcggaaaagcttttcttagtttgttgttgccggaaaactctaactattggtcggctacagaaaataacggtccttgggagaaagaactgaaaaaaggggaagtgtataataagttccagcagggaactaatctattgataaccaattacccgaattgtggcggatctgaaatgcgttcatggtgtcatgagactgtggcaaaagattggcagaaattccggagtaccgaaaattataataaactggcttaccatacagagttcccctggatggcagatgggaagaatggggagatttccatgaattatggaacaaggaataaaaaaggggaatgggaagtgttgcggttgtatacgttcaaaagtttcgaaaatggaatttatcgtcgtgacgctgtgctcgaaacggatagcactgtgaagtatcagttggcggatattcctctgccggatggaattctgcgggtagataaggtgactgtttcagaaccggcggagatttgtttgggacattattccctgcctcgtctggattccgatataaaggaaacaggttgtaaggtgggtaaacagaatattccggtactctctaacggaaaatatgaattggcaatgataccattgacaggttgggagaaaacatatacggtatatccggagggagtgcatcctgtaagtgagaaatgtgcattaaatatggtttccgatcagttatccggtgaaaaaatatatgtgacacttcaattatggaagaagaatgagaaaagaggttttacttcaaaagagctgacaccggtgaaatctgtccatgtgtcagaggataagaaacaggtgacggtttgtttatcaaacggtgaaataaaaactatttcgtttgagtaatgaatcccattcaagtaactgatatttaattaagaaacatattgctatcatgaaagagaagattgtttggatttttgtcgttttatatctgtgtagctttcatttgaatgcccaaaatgtagaaaataatcctactggcggcgggtatcaagttgcagctgaaggagcttggtgttggtttgccgatccgagagccttgcattatgaaaacaaggagggaactataaataagacatatatcggttacatcgatattcatggtaatataaaggcgatgcagtatgactttcaaaagaaggaacaggaagaagtattgatccgttcgtattttcagccggacgatcataacaatcccacttttcttgtattgcccgatgaaagaatcatgattttctattcaagacatacggatgaaccttgtttttattacagagtctcccgaataccgggggatattactactttaggtgaagaaaagaggattgaaacaaaaaataatacgacttatccttctccgtttattctgtcggatgatcctgaacatatttatttatgctggcgtggaatcggttggcatccgactattgccaagctttcattaccggacgacaaagatgaggtggatgtagtatggggaccgtatcaaatcgtacaatctaccggcgcccgtccgtatgcgaaatacatgtctaacgggaaagataagatttatttgacttacaccacgggacatccggataatgaacttcccaacttcctttattttaattatatcgatatcaaaacattgcagttgactgatgtcaggggaaccgtactttctactattgccgacggcacatttaaggtgaacaagacaggtgattatgcgaaacaatacccgtctacggtagtggataatccttctgaacgtgactgggtatggcaaatagcttcggacaggaacggaaatccggtgatagcaatggtacgtatcagcgataataaagaatctcatgattattactatgcaaaatggaacggacacgagtggaaaaagacttttcttattaatgccggtggacattttcatcagacgccgaatttagaaaagtgttatagtgccggtatggctatcgatccgtcgaatgttaatgaggtatattgctcattaccggtagagggaaaatatggtaaggtgtatgagattgtaagatttatcatgagtgaagatggagaggttatttctaaggaggcagtcacaaaagactcgcaactgaataatgtccgtccttatatgataccggcttcagagggtaccccattgcggctgacttggatgtatggcaactattatgattggattgtcagtttacaacatccacaaggctattctacaggaatagcctgcgacttcaaaggattccccgatagaaaaaagaagaagatgatagcggcatccggcaaagaaatacgatttgatcctgaaaaaccttttgtgctggaacagacgattactcttggcgcagataattatcaaggttgcttgttgcaactcggtgatctggaatattatctaaacggagaaacgatgaaacctgaaatcagatataaagggaaggtatataccagcacaaatgtattgggaacatcggattgttggaaaacacaggctcgtggaaccggtggcaagtggtatactccgcagaaatatggggaggttcgtttgaggatggaatataagaaaggtgttttatgtgtatatataaatgacttgctcgatcagagaattgactttgattgaaagcgagcgaactcttttatggagtgggctaataagtggaatcctcgtttatatcgtattatataataaatgaggactaagttcgaagtacaaattctccataatatcatacatttaatagagaatgattgtttttagcccttttttgacatataagtagacctttatattttatgtatcatctatctttgtagacaagaaatcttatttaatatcatgaatatgaatagacattgtggaataattaagtttatattattaggggtggtttgtatatcattactgcctgtatcagtgcatgcacagaagtatacggagtttatccccggtgaagtttggaaagatacggacgggaatccgatcaatgcccatggtggtggacttttatatcataacggcacttactattggtatggcgaatacaagaaagggaaaaccattttgcctgactgggctacgtgggagtgttatcgtacggatgtgaccggagtaggttgttactcttctaaagacttgctgaattggaaatttgagggtattgtacttccggcagttaaagacgatccgaatcatgacctgcatccctccaaagtattggaacgtccgaaagtggtttataataagaaaacgggcaaatttgtaatgtgggcccatgtggaaagtgctgattacagtaaggcttgtgccggagtggcagtttccgattctcctgtcggtccgttcgtttatcagggaagttttcgtccgaacaatgcgatgagccgcgatcagactgtttttgtggatgatgatggacgtgcttatcagttttattcttcagaaaataatgaaacgatgtatatcagccttctgactgatgattatctgaaaccgagcggacgttttacacgcaatttcgtaaaagaatcgagagaggctccggcagtatttaaatataatggtaaatattatatgttgagttccggttgtactggctgggatcctaatatagccgagatcgcagtagccgattctattatgggaacatggaagacaatcggaaatccttgtacgggaccggatgcggataaaacgttttatgcccagagtacttatgtccagcctgttgtcggaaagaagaatgcatatattgccatgttcgaccgttggaagaagaaggatttggaagattcccgttatgtatggctgcctgtgttggtaaaagatgggaaaataactatcccttggcatgaaaaatggaacctttctatctttgacaaataaaaaataaatatgaaacggatactgctactactttgcggaataatgctcgttcccgttattgcctgttcccagcatttggttgaagtgggaaaggggtatagctgtacttcggtcaatacgacggtctttcggaataattcgctggttacacacggtgatgaacaatatatcagttattacgataacgatggctatctggtacttggaaagcggaaactggattcggaacaatggacattacatcgcacccaatatcagggaaatgtgaaggatgctcataatataattagtatgatgatagatggagaaggatacatgcacgtatcttttgaccatcacggacatccattgaattactgccggagcattgctcccggttctttggaactgggggataaaatgcccatgaccggagttgacgaaggaaatgtcacctatccggagttctatcctttatccggaggagatttattgtttgtttaccgctccggttcttcgggtcgtggaaatctggtaatgaaccgttattcgctgaaagaacacaaatggactcgtgtgcaggatatactgatcgacggagaaaataaacggaatgcctattggcagttatatgttgatgagaaagggacgattcatctttcatgggtatggcgcgagacctggcatgtggaaacaaaccatgatatttgttatgcccgttcttttgataatggggtaacttggtataagacgagtggagaacgatatgaactcccgatcaaattgtccaatgcggagtatgcctgtcgtttacctcaaaactgtgagttgattaatcagacgagcatgagtgctgatgcaggaggaaatccgtatatagctacttattggcgggaacccgatagtgatgttcctcaataccgcatcgtctggaatgacgggaagatgtggcatcaacggcagataaccgatcgccagacaccttttaccttgaagggtggaggtacgaaaatgatccctattgcccgtccgcgtattgtggtagaaggtggagaagtcttttatattttccgtgacgaagaacggggaagccgtgtgtcgatggcacatgcgactgatgtgggtacgagtaagtggacgataacggatctgacggatttttcggtggatgcctgggaaccctctcatgatacggaactttggaaaaagcagcggaaactgcatctctttgtacaacacacccgtcagggaaacggtgaacgcacagcggaaattgagcctcaaatgatatatgtattggaaacggatatggatacaaataaataaagatatgaagaaactatatgcaactcttttttctgcactctttctaggcggtgcaatctgtgcaagttgtacggataagaaggatgcttctgctgaagaagtgataaacactattcataaagtgaataattattggcagacgaatcatccggaacacggacgttctttttgggataatgccgcctatcacaccggaaatatggaagcttattttttgattaagcagccggagtatttggaatactcgaaagcctgggcggaacataatgaatggaaaggggcaaaatcagatcataaggaaaactggaagtacagttacggtgaaagtgatgattatgtgcttttcggtgactatcagatttgttttcagacgtatgccgatctctataatatggaaccggatacacagaaaattgcccgtgcccgcgaagtgatggaatatcagatgagtacccccaatcatgattattggtggtgggcagatggcttatatatggtcatgccggtcatgacaaagatgtataacattactaagaatccgctctatttggagaaactgcatgaatacctcgcctatgctgatagtattatgtatgatgaagaggccggactttattaccgggatggaaaatacgtgtatcctaaacacaaaagtgtgaacggcaaaaaggatttttgggcacgtggagacggctgggtattggccggattggcaaaagtcttgaaagaacttcctgaaacagataagtatcgtccggaatatatagatcgtttccgtaccctggctaagtcggttgctgcttgtcaacagccggaaggttactggacacgcagtatgctcgatccattgcatgcaccgggaccggaaaccagtggaacggctttctttacctatggtttacaatggggaatcaataacggttttctggatgctgcagaatatcagccggtggttgaaaaagcatggaaatatctctcaacagttgctttgcagcctgatggcaagattggttatgtgcaaccgattggtgagaaagcgatacccggtcaggtggtagacgcaaactcaacttcgaattttggagtaggtgcgtttctattggcagcctgtgaacgggttcgttatttgaataaataaatacaggcacggattatacgggtttcacagctcttagaggcatgccttaatataagtcaacagcgtaatccgtgtaatccgtgcctaaaatttaattcagcatcaagctcatatatggctttaacggctgaagtattctattggttaattcgctaatattcatttgtatatgtgcaccgggcagtcgctcggtattatacatacactttcctttgcacaggtaataatagccgttgtttacagacaattgtttgtccgataattccagctgcatttcatcttcaggaaaagccgcggcatagatttgcagcacttctttggcattgatgatacgtgccatgcctagcggatgttgagactgtttatcttcaggaggcagtagttgaaccatgcgcttgcagccggtgtgctgcctgatcgcatacaataaactatattccacatctttatcatcagcgcaaagctcattgataatgatatgtttgtctcctttatatataatggttattcctttgatttcgttttcctgtctggctacaaataaataacctccactaatggcaagatcggtcataataacctgaaagtcttccgatgtgtgctgaatacagcaagcccgttcggaaagtttcttattcaaataggaatagacctcctcctgaaattctgaaacaacactgaccgctatctctttagaagggataaactcgggcaaaacgatctctttagttgaatacttgaataccgaagcatatcccatacgggcataataatcaaacaaccagggttctgccggtattaatgtgctgaagtgtactccattccgtaacatccgggcgaaagactgtgataaaagctcgcgcatgactcctttgcttcgaaaatcgggatgcgtacaggctcctgaaatataggaggtctgtacagtctctccaccaaaagtcatcggataaggaagcatttgaagggcagagattacctcatcaccacttttgatggcaacgttcacctctgtcttatagcgtagtctgaagtacatctcgacgaattcttcactatcgtcaaaacagactttccacaatgcttttacttgctcctttatcatcatatttataaagagtttaccatttaaccatattcatgggatgctctttgagacaagccatgtatttttccagaatcgtcaccggttggtaagacaatttggctttgcgcaaaccttcgagacctaaatcctcttcccggttgatatagatatattgttcgggaatccggttggcaaattcataattaatcatggcatacgcaccttcaatattggtatccgctttctctacatgcacgccgaacgtttcatgattgataggcataccgaatgtgaatgcgacgattttactgttcacatgaagaatacctcccgtcagtccgagtgcatcgaagttgtggagggcataaatcagggcgcgacgttcattgcccgtcccttcctgctggtcgcagtgattcactttacaccattctgcttccagatccagacattcctgaatgcggtccggagtgatcggtgtatattcataatccggataagtgttgcggaaccggttgatatgatttcttttcgcttggaatttcttacccttcagtgttgaaagatcacttctcaaatagatataatccgcatagtcgcggtcttctgtaaatgtgaactgtcccggaaggatagcttcgagatcagcacgcatattactgcacactcccaacatacagaaatgctggttctctttgcgggcatcttctatcagttcccacaatactgctttcaaatctcctgtgcctacgggcatcatataagcgagttgttctcccgcccagaacttgaacaccagaaagttgtcgaccactgcaaattgggtatcatataagaacctccaactacaaagattggagaatgaaagatcgcaattgcggcgatcacttttcatcgtgaatgaggtgattgtgtctctgtctgctaacgtgacatctttaaatggaatcataagattgctttttgcgtttaactctttatataacggaaaatcaagagattttgtttttacaaaatacctaataatcgaaggatagtaggtgttagcagtgcagtgaatattccatttagcgtcagtcccaggctggcgtatgctccatatttgctgctgatatccattgcagtggaggttccgacggcatgagcggctgttcccatcgaaagcccttgggcgatcggactgcctacacgcatgattttcattgtcttaaagccacagatagcccctaataaacctactgctacaacaactgccgccgttagtgacggaataccgccgatagctttggttacttccatcgcaatcggggtcgtaaccgatttcggagccagtgacaggattacctcttgtgaggctcccatgaatttcgcaatcagtactactgaaataactccgacgatgcagcctgccagttgagacagtagaataggcaataactgcttttttatcatttccagttggagatataaaggtacgcctaaagccacaacggccgggcgtagccagaattcgatcagatgtcctcctttattatatgtctcataagagatattggtcgttttaaggaagatgattaatagtgcgatggtcagcaatataggatttaataataccagtcctgttttcttctgaagtagtttggcaaagaagaaaatcccgaaggtaatggccagcaggaagtaattattttctaagaagctcatttgtctttattcgttaagttgattttatctttaaggtgtagtttctccggcagatggaaatctgacagatgaagtttgcgtgccagtttgatctgacgtgccagcctgaacttgcggacgatttggtgcacccatcccgtaacgacaagtacaagcgcggtgctgacaatggtcgctgtcactatcggccagaactctgccgcaatgacgtcaaagtacagcataagagccacaccgggcggaacgaaaaagaatcctaagttggcaaccagaaagtcggacaatccctgtacccagtgtaatttaatccaacctaattttaaaaagagggtgagcagcagcataccgatgatgctggaggggagcttgatacccgtaagataaactattaattcacccaaagccaaacagccaaataaaatggcgcactgacgtatcataactaataacctattgattttgtttgaaaacgctgcaaaggtatgaaaaataggagtacagtgttaaatattacaatattttagacttggaagagaaaaataggcgaaattgtaatgtggatattgcaaaattgagtacttttgcaccgcaaattacaaattgtaaggacgttttataataatattcaatatatctatgctcaatttaatcaaccaaatcgtggcgcgtgcgaaagcaaatcgccaacgtattgttcttccggaaggaactgaagaacgcacattgaaagctgccaatatgattttgacagacgaagtagccgatctaattttactgggtaaaccggcagaaattaatgaacttgctgcaaaatggggattgggaaacatcggtaaagctactatcattgatcctgaaacttctccgaaacacgaagaatatgcgcagttgttgtgtgaacttcgtaaaaagaaggggatgactattgaagaagcccgcaagttaacgaatgatcctttattctttggttgtttaatgattaagagcggtgatgctgacggtcagttggctggtgcccgtaacactactggtaatgtattgcgtcctgctttgcagattatcaagactgcgccgggaatcacttgcgtgtctggtgctatgttgcttttgactcatgctcctgaatacggaaagaatggcattttggtcatgggtgacgttgctgtaactccggttccggacgctaatcagctggcacagattgctatttgtactgcgcagactgcgaaagccgttgccggtattgaaaatccgaaagtagctctgttgagcttttcaaccaagggttccgctaaacacgaagtagtggataaagtggtagaagctactaagattgcaaaagagatggctcctactcttgatttggatggtgaaatgcaggctgacgctgctcttgtaccggaagtgggtgctagcaaagcgccgggttctccagtagccggagaagcaaatgtgctgatcgttccaagtttggaagttggtaatatttcttataaattagttcaacgtctgggacatgctgacgctgttggtccgattcttcagggtattgcctgtccggtaaacgacttgtctcgtggttgttctatcgaagatgtatatcgcatgattgctatcacagctaatcaggccattgcagcaaaagcgaataaataagtattagatataaactattaagtataaatcgacaacgacatgaagattctggtattgaactgcggaagttcatctattaaatataaattgttcgatatgaccaccaaagaggtgattgcacaaggtggtatcgaaaaaatcggtctgaaaggatcattcttgaaacttactttgccgaatggtgaaaagaaaatattggagaaagatattcctgaacatacagtaggagtagagtttatcctgaacacgctgattaatcctgaatacggcgctattgaatctttggatgagatcaatgcagtaggtcaccgtatggtacacggaggcgagcgtttcagcgaatctgtattgctgaacaaggaagtgctggaagctttcgctgcttgcaatgacttggctccgcttcacaatcctgctaacttgaaaggggtaaatgcagtttctgctattcttcctaacattccgcaggtaggtgtattcgatacggctttccatcagacaatgccggattatgcttacatgtatgctattcctcacgaactgtatgaaaagtatggtgtacgtcgttatggcttccacggaacttctcatcgttatgtgtcaaaacgtgtatgtgaattcttgggtgtaaatccggtaggacagaaaattatcacttgccacattggtaacggtggttctatcgctgctatcaaagatggtaaatgtatggatactactatgggcttgactccattggaaggcttgatgatgggtactcgtagcggtgatattgatgccggtgcagtaacatttatcatggaaaaagaaggcttgaacacaaccggtgtttccaatctgttgaacaagaagagcggtgtactgggcatttcgggtgtatcaagcgatatgcgtgaactcttggctgcttgtgcggctggcaatgagaaagctatccttgcagagaagatgtactattaccgtattaagaaatatatcggtgcttatgctgctgcattgggcggtgtggatattatcctgtttactggtggtgtaggtgagaaccagatggaatgtcgtcgtgaagtttgtaaggatatggaattcatgggtatcgaacttgataacgaagtaaatgctaaggttcgcggtgaagaagcaatcatttctactcctgcttctaaagtgaaagtagtagtgatcccaacagatgaagaactgttgatcgcatcggatacaatggatatcctgaataagtaataattttattgctgatatacaaaaaaaagatggactcgatttcgagtccatcttttttttgtcttactttgcatatcaaatagttatatcccgtttttgatatgcgttactccgtcataattcccgtttataatcgtcccgatgaagtggatgaattattgcaaagtcttactgtacaacactttaagggttttgaggttgttgttgttgaagatggttcttccattccctgtaaaggagtagtagaccggtatgcagatcggttgaatataaaatatttctctaaacccaattccggtccgggacaaacccgtaattacggagcagaacgtagcgaaggcgaataccttattatattggattctgatgtcatccttcccgaaggctacttcgatgcggtagagaaggagctcaccacttctcctgccgatgcttttggtggccccgaccgtgcacacgattctttcactgatattcagaaggcaattaactattccatgacctctttcttcacgaccggaggtatccgtggcggaaaaaagaagatggacaaattctatccccgtagttttaatatgggagttcgccgggcagtgtacgaggctttgggaggtttttcaaagatgcgttttggggaggatattgatttcagtatccgtatctttaagaatgggtacacttgtcgtctttttcctgatgcctgggtatatcataaacgtcggactgacttgaaaaaattcttcaagcaggtgcataactccggcattgcccgtattaatctttataagaaatatccggattctctgaaactggtgcatttgcttccagccgtatttacattgggagtggcgcttctattattaggaacccccttctgcctcttcagtttcacgcctatcattctctatgcattactcgtatgcattgattctactattcagaataaaagtctgtctattggcgtttattccattgccgccgcatttatacagcttatcggctatggtacaggcttttggcgcgcatggtggcagcgttgtatcagagggaaggatgagtttgaggctttccaaaagaatttttataagtaatccattttttatttgcctattaccattcctatttttgtttaaaaggaatgttgtctgacacccgggtctcaatacgtctgacactcgggtgtcagacaagttatactttcatggaaaaaaagtaatggatgcaatcgaagaaatttttataggctatatcttttttcatttagtggagtgcaaatcacatttcttattcttcccttaaaccccagcaatttgtcgcctatctgtttcaatgggaagataagtgtttcctgataccaaatgctgtctttacgcaggcttttctgattgtaaactacaccgattcgtccttccaaacgttcttgtagctctccgtttatgtaaagtgaggtccctttggcatctccctctacacgaacctttgtccatttttccacaggcaaacgataggaatggaagatgaattcatagccgtcgcgcgagaatgcgaatttacccgtattttgccagttcgcggtgaaaacagaatggggacctttgaataagaccgcatcgatattgggctttggatctgcgtagatttcaaattccacactatatggataaccgatttcgggtatagaggtaagaaccgagtcgttaccttgcaggataatttcctggccggaaagcgttaggtcttttctgtcatctatgctggcctgtagatttacgcccggtgcttccggtgttgtcctgcaccacgtttcgaaggtttcaaacggtatgtttcttgtgttttctcctttccaaagtttctcgctcataacctgcatggcaggaaaggtgcgtatatgtacatcctgttggctgattccatttccgacacggtcgttccatacagcaaacatggctcctaataaattagtagactgctctatcatttctccctcttgcatcattcgtggtgaccaactctcatatatccattgatgatccagaaagttatggtagtaattcacggctggtacgatatatagaaatgcatcgcatgtattaatcgctttggctccttcctgcagtgcggtttctaagtctagccagctataattccatgcattgaccgtttttcctttcagatttacgggggtatttcctttcatgtgtttcagacttccccataatcgcggattttttccatatttggtgatatacttcagatagtattcagtgaaatagcggaattgttccgcttctttgaggttgtactcatcagtgccgatatgtacgtccggtccgacaaataccgggtgatctcccgagagatattcgtcaaacaaagtatcaaggaaatcatatacctcttttttatagaggtcgagatgatccataccatattcttttttgtcggctgccagtatcggattgtaatgagtgaaagcgagtgagtgtgccggaacatcaatttctgggatgatattgattccatatcgtgcggccatttgctggaagttgcggaattcttctttggtgtaggaaccatctttggatgtgagtcccggaaaacggtcgctttccaatctgaaggcggcgtatgttttgttccagtcattatcgaaaaactcaacgaaaccattatcattcagatgtatttgcagttcattcattttatagaacgagagaatttttacgtaatcctgcaaatagtccattgtgaaaaatttcctggctacgtcaatcatcagtccgcggtgagcatactgcggataatccaatgcttttcctttcatgagtccaaaaggctggttatggatcatttgcaacagtgtgcgagttccccagaatactccttttacggtggaggcttcgatggttacatggttgcgtatatccagttcatagctttcttctcccaatgatgaaggcgattttttcactgacagatagatagaatgatttttcggttttccggaggttacctgataattccagccgaacatatcttttaagtcttttgccattatttccgcagtttctttcaacaggctttctgcttccggagcgattataatctttcctgtttccggtagtgtcagtttgccttttgccccattccaatgttgtaaggagggaatcacctgcgggatatccgtttgagcgtatactgtcattcctaatagtagtaagatggataagatgcttattctctttttcatatttattagatgtttatatattaatcttgatagcgcaaaactacgatatttggaagtaaagggattctaaaaatagacttatagcttccaaaattcattttttcagttatataggagtatctttgtgacttaatttgattaataatggaaagtaaacacaaactatccatcaaccagtgggcactggaagaccgcccacgggaaaaaatgatggagaagggagcagccgcattgagtgatgccgaactactcgctatattgattggctccggaaatacggaagaaagtgctgtcgaattgatgagacgcctgctcctgtcttgtgataacaatctgaattcattggcaaaatgggaagtgtgtgactattcctctttcaaaggtatgggacccgcaaagagcattacagtgatggcagccttggaattaggcaaacgaagaaagctgcaagaaaccaaagagagacttcgaatcacttgctcaaaagatatctatgatattttccaaccgatcatgtgtgacttggaacaggaagaattctgggtgctcctattgaaccaggcaaccaaactaattgataaggtacgtataagtactggtggcatagacggaacttataccgatgtgcgcaccattctccgggaagcattgctgcaaagagctacacaaatcgcggtggtgcataaccatccttcgggaaatattcatcccagccaaccggacaggagtttgacagagcatatccataaagcggcggaaacgatgaatatccgtctgatagatcacgtcatcgtttgtgaagacggatttttcagctttgcagatgagggcctactctaattagtaatactaccttatttaagtgagaatatcttatttattctcactcctgcattcatttttatactgcgtgggcgtcaagcctgtgtactgtttgaatgcagtactgaaataacgtaaagtagtgaaacctatctgatctgatatttcagtaaatgtcagatcggtggtttttatcagagtaatggcttgctccaacctgaatttgttgatatagtcatttgcccccatatcggtgatagccttcaacttgttgtaaagagatgttttactcattccgatctctctgcagataaaaggaatatctaaagacggattgctgatattctcggaaatgagcttgttaaactttaacaagaacgtttcatccgcctggctgaaagtactctccagcggttgagggaagttgcctatatgttgatagtgctctttcgtttgctcccggttgtatagccggttctgtataatcttaacaagagtgtctatctcaaaaggttttcccagataagcgtccgccccgattttatacccatacagtcggctctgttcatcattgcgtgccgtgagcagaatcacaggaatatgactgatgccgatattctcttttaccgctttgcacagttcgtatccattcataaccggcatcatcacatcgctcactataatatccggaacttgcttttgcgctatttcgaaagcttcccggccatcatgtgctatataaattgctttgaataaggacttcaattctttggagaggaaatctgtcaggttatgattgtcgtctaccaatagcactgtgtaattctgcgtagagaagtcgagtgtctcgggagcgttgatctcatgatctacgtccggtgtaatcaattcattgatgtaaggtttcggctggcagatgacttcgcccgactccaatcccaaaggcaagtcgaagaagaaagtggctcctcccgcttcgttgttcatggctccgattttacctttatgcaattccaccagcatcttggcgtatgaaagtccgactccgctaccgccaatttcctgcttgccttgatagaaacggatgaataccttctccatgtcttcctcttgcataccttctccctgatccaaaacggaaacacggacgtatgagtcatttttgctggtacggatagtgacggttgtgtttttaggactgtgtttcagtgcgttcgtcaataagtttgtgactacgattgtacacatacccttgtcaaataccacctcttttatgctgtcgtcgagctgataatctatttgcacttcctgggcagctccctcgtccgtaaaatcggcaccaatctcctttatccatgagttaaatggataggcttggagtttcaacttggtttctcctacttccatcttacgtacgtccagcaccatgttgataagatctttcatccgttgagcctgtttatgtatattcttcaacggtggataaatggcatctgtagaaggaagtgtctttaatatgcggcttagcggggcatatatgagtgtgagcggagttcgcagttcatggctgatattaatcagaaaacgaactttttcttcatacacattctgctcgtgttctttcatcatccatttcatcttgttttctttgcgtcgaagcagaacgaaaacaatttgtaccacaatgcctatgcaagcaatgatgcagagagaaacgaaccaccagcttctgtaccagggtggcagtacgtttaatgtgaaaagaaactggggagttgtttcatttccttcctgtgtgttacagctcaccatgatgggataacttcccggagcaagagatgggatcatcaattcagggttgtagccttcggttttaaggtctcccatttggaaatgatagactttgagccggagaatgtccgcaccataagtcatgacacggatcttaatgtttttactgttccaggggatggatatcttgtcttgattgagctgatacatcctgttctctccgtttatggtcagttcggcaaggcgtatttccggagagtcactactcttttctatttgagtgtctgcattgatacatagtaagccttttacacctcccatatagatgttgcctttgggggaaatgagacggggctcggccaagtattcattgggggaaattccatccgcttctccgaaccatacaaaacgtttggtatcggtgagccatataaagagtttctgttcagctcctatccacacttttcctttattgtcgcataacacggtatttacttcattaaataaggtggtaggaattctttcgaatttgcgggtatcagggtgataggtgtacaggccacgggtgcctgcaatccagaatacgcccttgtcatccctggatacagcattgaagaatccctgtggagcacttgcaaatatctccactgtgtcttttttacgatccagtctatatatattataaggatcgttcaggtaaatggcagtggaatcatatccaatggaactcaacaagccttttattttcacttctttggcacaagggacaggagtgagttgccgggtggaagtatggtagcggtaaggaggcgaacttaatattaagatcgaattgggagtatcccggtataagttgattggctgtccgctatagcggatgtgatgctctaatgaagggctcataatagcgaaaggacgcttctttcctgtctttttatcgaatatgaagatacctttggaaaaggcagatactaacaattcgttgggtgtgaagccggtgatggagaccatcttgtctccccaagtgtcgggatagtgcacaaatgtttctgtagaaggaatgaatttattgatacctcctccgtccgtagcgatccagagttcttcggaagccggttcctgatatagttgtaataccgtactttgacttaatcctttgttgtgccctaacacaacattagtgtaagttctcatggatacttcacgaatgttgataaccccttcacgtttacttcccgcccatatatttccggcagagtcgctatgcaggcagagtattgtatttgtgggaagggaatgattatctccggagatatgttcgagtacggtaatattgccggttgtgggatcgaggatattgatacctcccccgtctgttcccatccatattttttgtttgaattcggtcatgcacaatacgatgtcactgctcaaacgggagttttgagtggtataactggctatcaattttccctgggcggagaaacacttgacgccattgttgtaggttgacagccatattctttgttgggagtctatgatgattcctacgttgtcgttcccgtattggaaaggaaatggggttatctcgaaattcttgaggttcatttgcagtattccctgttgccagcttagacacaatatggtatcgggtttccacatttgtatggatcgtataatgaacggctcgtcggtcttgaattcccgtatgagagaaatcgtgttggtggcataagaatatttatatatcttgttgatccctccgaacagaagtccgtctgctattttgcagatcgatttggcaatgatgggctgattatttagtttggggataaagaagttgtcgtgaataagagaataacgggcgattcctgtggtggtcagtatccaggttgtctgctgattatcttcaataatttgcaggatactgtcgttaggcagggaattttcattatcaggttgtgcggtgtactttttgagttccgttccatcaaatctgattagtcctgtcggagtaccgatccagatgaatcccttttgttcggtatagatacagctgatgatagacggcattccgttttgggaaccaatcagtttaaagtcgtaatggttacctatacttattgctggaaatgtgcctacgataagaaaagccagtaagcagaaaaagtgttttatccaaatactttttttcatcagtcaagattattaaggggagattagtgaaacaaaagtatgattaattccgctaaaacaaaagaaatatttccaaaaaccgccacaaagacgttcaaaaacggaatatggatgtttttggaaacattttggcgattttatgaactcgccattctgtcaatcaatctatttttgtggtgtatttcaatgccggatagtgtgggctattggcaaatggaactcaaaaaaacttttagtattaactttaatataatgttatgaagaaaatgcagattaggatgcaactggtgtgtctcttttcaatgcttttactgttcttccctgtggagctctttgctcaacagggcactatcactggtaaggtggtagacgaacgtggcgagtccgtaatcggagcaaccgttatggtgaaaggttctactgatggtaccattaccgatttggatggaaactttaaaattaacggtaaagtaggtacaacgataactgtcagctatgtgggctatgctcctttggaagtgaaaatcactaagctaacaggaaatcggttcgtgatgaaggaagactccaaaactttggatgaagtggtggtagtcggtatgggaacacagaaacgtaatactattacagcggctgtagctacagttaatgcggatgcaatcgctacccgtcctgtgacggatgtaaccagcgccttacaaggtaatgtggctggtttgaactttgcttcggatgcttctgaaagcggtaccggtggtgaagttggcggagaaatcaaatttaatattcgcggtatcggttctattaatggtggagagccttatgtattggtggatggtgtggaacagagcttgcagaatgtaaatcctgccgatatagaaagtatcagtgtattgaaagatgcttctgcagcagccgtgtatggtgctcgtgctgcgtatggtgtggtgttagtaacgaccaagagcggtaaacaggataaagcccgggtgacttatcgcggttctgtgggtatgagtgcacctatcaacatgcccgagatgatgaactctgtagagtttgccaattataaaaatgcgtaccgttcggcaattggtgagtctccatacttctcacaggagactattgatttgatgaatcagtttttgcagaacccctatggtgaaggtctgcccggtattaccgccaatcaggagaataccggttggcgtggcggtgaatcgcagtatgccaataccgactggtttgattatttctataaaaacaaatctttgcgtcattcacacaatctaagtatctccggtggatcggacaaagtgacttattatgtcggtctgggttatacttaccagggtggtttgctggatcgtgtagaagactctctggataaatacaacgtgaataccaaatttcagatcaagccgaatgactggttgaagtttaacttcaataacaatatcacgttgaatctgatttcccgcccgctccccgatatgtctattctttatcatcagatagctcgttcgcagcctaatatggtgactgaagttcctatttccgggctttataatcttccttcatggaatgaagctttgtatctggacaatgtgggctattcgcagaaccgcatttctgatgccatgacttttgcagctactgttacgcctctgaaaggctgggacattatcggagagatgaaagttcgttttgatgtgcagaatgatgaattcttgcagaagcagccccgtaccacacggcccgacggaaccatagagaatgttaccgctccccggcagggatattcttatcccggtatcgaatattcgaattctttgtggggatcaatgactcgtggaaatcaattcaactattatttgtctcccagtgtgtcgtcttcatatacgaatcaatggggtgaccatttctttaaggcaatggccggtttccagatggaagtgcagcaaaactcaagcatgtatgcatataaagacggagtgatgagcgatgatacattctcttttgacaatgcaaacggaaaagcctataatagtgaagcgcgtgaccattgggcaaccatgggattctatacccgtttgaactggaactaccagaatgtctattttctggaatttagcggacgttatgatggttcgtcacgtttcgcttccggcaatcgttggggatttttcccttctttctctgccggttatgacattgcccgtaccgactacttcaagcaatggagcttgcctgtttcacagttgaaagtgcgtttgtcttacggacgtttaggcaatcagaatggagccggactatatgattatctgaacttcatgacattgagaccggactattcaaatgcatggttgctttccggcgtcacttcggctactccggtacgtggtacagtcgctttaacgccttctatggtaagcccgtatattacatgggaaaaagtggataatgccaacttaggtttcgacctgactctgcttaacaatcgtttgacgattacggcggatatttaccaacgtacgaccaaagacatgattggcccggctgaagcaattcctgatattggcggtattgctgttgaccaacgtgctaaagtaaataatgcaacgctacgtaaccgtggatgggaattgtcggttaactggtctgaccagctgaagaatggtttcagttatggaatcggtttcaatatctttgactacaaagcagtggtaaccaaatacaataatccggaaggattgatttataacaaccacaccggtctggttcgtaacaaaggttattaccagggaatggatttaggtgaaatctggggatatgaagcaaatgatctgtttctcaccaaccaggaagtggatgaatatctgagaggagtagacatgtctttcttcaaaccgaataaggattggcaacgtggtgatttgaaatatatcgattcgaacggtgatggtaaaattgatccgggttcgggtacattgaaagatcacggtgatttgaaaattatcggtaatacgactcctcgttactccttcggtctgaacttacatgccggttataaaggttttgaagtttccgcattgttctagggagtcatgaaacgtgatttcccgatggctgcaagtacttatctgtttagcggtgattccaacttctttaaagaacatttggattattataatgtgtacaacccgggggcttacctgccgcgtctgacaaaacccgacagtcctgaatataatgcgaacgtaggttacaacacttcacgttatttattgaacgcagcttatatgcgactcaaaaacttgatgatttcttataacttccagcctaaactggttaagaagatgggattggagaacttgaaagtgtatttcacttgtgataatctcttcacgattgacaatttgccggacgtattcgatcctgaaaccttgaatcaggtaaatacatgggctgggggtagtaacgaaactgctccgggattgacttccccaatgaagcaaaatggtaacggaaaggtatatccgttgaataaaaactacgtatttggtattgaatttaccttttaaaccataagatatgaaaagaatatatataatggcttttgtagccgcttcaatattaccattttcatcctgttcagattttctggatagagaaccgataaccaagccggaagccggtaattttctgacaggtgccatacaggttgaaaactatattaacggactatatatgacgttgccgtcttttagtaagttcggtttgggagttcgcagtgaagaaaagaatagtgacaatattattgcagaaaagtatgatgcccgtttgcatggacagaataaccagtttagcggagcttccgattggcagactggttatcagaacctgcgtaaagtgaactattttttccataattataaagtacccgaagcacaggaaaacgaagatgtactgtcgttgaaaggggaggcttactttttacgtgcctattggcatttcgatttattgaagaaattcggttctattccggtaatggatgctttttgggatgagaatgcgacaatcgcaggattacagattcccgcaaagacacgtaatgaggtagcccgatttattttgagtgatttggttgaggcgaagaatctgttgcattcgcgcggtaaatattccggaattcgtatcaataaagaagctgccatggttttggcaatgaatgtggcgttgtatgaaggaacttgggaaaagtatcacagcagcgatgattttgcatcttccactaacgaatcaaattatttcttgggtgaagttattaactggggaaatgaactgttcggttgtggcattgatctgtataaaaccgggcaaaatccgggagatgcttttgcggcattgttcaatagcaaagatttgtcaggaatgggcgaagtgctattgtggaggaaatattcgagtgatgaaggagtctttcatgatgtcaacggtaatctgaaggcaggtgttgtcgactcggaaggagctgccggaattactcaaagcctggtggataattatctgaatgccgatggaacatttattgatccgacaaatgagaaatttaaggattttaaggaaacatttgaaggccgtgaccctagattgattcaaacggtgatgaatgaaggtgccaaatttgcttctgccattactgcgaccccaatgcatctggaagaatatacggatgagaagaagaatactattagtcctcctaaattggcaggagatggaaacacacgttctttgacgggttatcacatccgtttgggaatagataccacctttgtaagtggtaatggtgagactgctttacctattattcgttatgccgaaggtcttttggcttatgcagaagctgctgctgaactggaaatgtggagcgatgatatagcgaataagacattgaaagcgcttcgtgaacgtgcaggagtgaaatatctggcaccggcaaaggatgctaatttcaccgatttcggttatacattgactcctgttttacaggaaatccgtcgtgaacgccgttctgaacttgctttgcaaggtttccggctggatgatctcatgcgttggaaagccgataaactgattgttggaaagcgtggtaaaggtgcttatgtaggtgatgaatctattttattcaaatcttacagtccggataatcagaaaagaatcagagagcgtctgacccttgatgataacaaatgggcggatccgatggccgggactctgccaagcggatatcaattccatgcagatagggattatctgttaccgatccctccttcagaattggaattgaacaaaaagttgaaacaaaacccgaaatggtaatcattaataatgatataataggatagattatgaagaaatatttctatagattattaccaatttgcctgtttatccttgtaatgacaggctgtaatgacaccgagacggttatctctatcggagaagcccggaatctggtggccgaaatcagtactcaaagtgctgctatcggagataatgtgacctttactgtgaaggtagatcagcaagacaatcagttggcactcgaagaagatatagacgttgttctgacttttgcaggtaagaatgtagaaggaaaggatgtccctgtatctgatgtctttgaaggctttgccggtcatctttttatgaagaaaggtgagaaacagggatttaccgaatttaaggtaaagaacgatctggctaaatatcctatatcgggtactatcaccgcttatgtcagaggatacaagatcaatgcggctgaacgtccgattgtggtatctgataaacactacaccatcttgtcattgaagaacaattcggacaatacggtgaaagagtatggctcatttattctggtcgctacggtaggagcgtcagctaaggaagatgtagtcgttcatattgatgcgggtgaagatgcggataaatatgagaatctgccgagcgaattggtggtgaaagccgggtataaaacagctgaatctgaacttatatgggtgaaaggagagaaaggaccgaatactttcacttctgtgtctatgtcttttgctaccgattctgaaattcatccggtatatggggacgagttggaaattaaggttactgatacggatgcaggtttgactccgggcaccgagttaaccaatgagcaatgggtttatacagatccggatcagatatttgtatcagccagcaataaaaaggctgtagaaaaatgggatgaggtcagagctgcgtcagcactattgataaaggagggtgatccgcatccgaatgaagcgttagctgctgaaggatggacattcctgaattcttatgagttccatccgattgatgctttgacagaaggtaccggactccccaatcagtatggtaatcgtcctccacgttttatggcggcacagaatgtggctaacacacagaaagtacaagcggttgtaaatgagaaatatgcaacgatgactcaagatggatatttgaaaatgtggtgtgcgtatgatccgggaatcagtgtgacaggggaaattacgggaacaagagattttggagtttcctccctctatgcaagtaagtttgatggtgtgcctacgggtgctgattcttgggaatccagcaatgtacgcattttgccgggcactcgtgtggaagttagaatccgtgtgcgtggaaagaaacactctttcaactcggcagtctggttccaaggaaatatcagaggtgtgcaatggtctacctatggtgaggttgatcttctggaaaatccggctaccaatgcgaatccgaatggcgcttggcagactttccactggaatgatatatccacttcatccggtgataagtataaaccgtcttcaggacagttgataatatcggatatggatgaattcgatatctattggatggaatggagagataataacgagattgctttaggtattaatggtaaagagaatgtacgcatgaggactgacggcagctataccggaatagctaatggaacggcttcatggaactcgtctacacattggccgtttacggacaaatacaatacggaagggttacatttactattgacatttgccggatgtaatgaatgggcgcttggtgacgctgcggcagaacaggctgctaaagatggtagttgggcaaacgactttaagcatatttcttatcaggaaagtaagtctagcaatgatacgccacgtatggaaatcgactggatacgtttctataagaagccaacctacgactattttggaagtggtactccaacgcgtaacaaaccaatgtattaatggttgttgaaataaagatatttaatcgaacaaacttttatatagttatgaaaaaggtttatcacttattgagcgttgcactgctgggcgcaatggcactaacctcttgcgaagaggacaagatagtgaatgaaaataacggtgaagggaacgaaaccgacaagaatctgactgattattcatttatagcttctattaaacagtccgcccctttgggtcgcagcaatttgcagaatggagtgtatacatggaataaaggagatgctgttacattatggaatcgcaacttcggagccggctatgatttctctatcaccccggggtataatgacaaccaacctgacaaatctgctgaattcacaggaaaagctgctgtagaaaatggccataagctgattgcggtatttccacggaaagaagcaaaaacatttaatgacctggctaccttttctatgccggagacatttactcagactggaaaaacagcagaactggcagccactacctatatggttgccaccggggatgtgactgataataagattcctgcattaacgttttcaccattgactgcattgatacagtttggtttgaaaaacacgtcggaccgggaactgaagattcgctatattacgctggagagtgatgatgatgtatttcccgcagagttgaagatcgacgaagacggagtggtacagagtctttcaggtatgcgtaacaaactgacacttgacatgagtggacaagcattggcgcagaatgaaacattaaacgggtatttgaatatattacctacaacctatggtgatacccggttgatgaaaagtacgaccgaactgaatattacagtaagcgttttgaataatgaagtggaacaggatattatcctgctgaaaaaagtaaaagtcaaagatttggaggataacatcggacttgatatggatgctactgccaatcagtttgcagccggcaagcattataaaatggattttgaggtagattatcgtttcagaattcctgatgagggctatatgatcgatgatgatggaaatattcatatctataataagactggattattcggatggaataaaattgcggatgaataccgtaaggcaactgttactttagaaaaagaatatatcgatgaaccggcaggggatggaataaaagtgattgatatgggtaatgaactttgggaacctattagtgcgtttggaggtgtatttgaaggtaatggtgttaccatccgcaatttgcaaatagctaataaaggttttattgctaccaatacgggaactatccggaatttgactttggaaaatgtaagtttctctgctgatatcacagagggagcaggagcattggctgccgaaagttcaacgagtgtcattcagaattgtacagtcaagggagtgactgcaaccgttataaaaccggtagtttttggtggtttgatcggtcgaaactccgaaggaagaatagaaggttgtcaagttatcagtggaactattaaccttaatttgagtggtgctggtaattctaattatggtggcttggttggtgagcattttaatggaacggctcttattataaattcgtatgtcggtgcagatgtaacaatcaagcatcctagtaactctagtggtgcatcctgtgtcggcggacttgttggctggaacaactccggtaaagtcaaaggttgttactcattagccaaacttgaggtttcttgttccggacaagtaggaggacttataggggctaatagtaacggtacggttctggcctgttatgtagccggttcaattagtggaactatctataataatactggcggtttcattgcacagaataccattaataatgctgatgctactgtgacggcttgctactcgaccacgcagataaatgtgactaataatgctggaagtaataaattgggagctttcgtcgcttcgaattcaacaggaatcaaccagtgttatttcgtaggcgagacggtgactaatcctgtaggaagcggatctgtaaatggaattagtaaggtaacagctactcaactcaaggataagaaacgtcagatgaatttggcaatagaagccaaggatccagaatttggttttagctttaaagtgaatgaggatgccggaactaatatatactgtccgttgattctacagggggctgtgaaagaacctggcttcggtggatcagattttggagatggtggtgatatttaaataactgataacagaaaaaaataaatcatgaataaaatctattctttattagggatcgggctgctaagtgcagccaccctaagctcttgtaaagaagatgttttcattgaaggtggggatgaactgcaacggggagaatcacagacttatgtggttgttgcttctatccgggggtatgaaaatacggacaaagaatcgtctacacgtgccaacgtacaagatgacggtagttcctttatgtggaatgccgatgataaggttacactttggaatggaacaaatggctatgatttcacaaccataaattatgatgagagtgaaccgtctggaaatgtggaatttgcagggaatggtaactttgaagagggagctactgtttggggaatctatccgaaaaaagatgttccgacttcagggaatgttttcacttttacgttgggagatgctacgcaaagtgcccaaaaagcagagctgcagaatacgatgcacatgcttgctaaaggcacggtgaatgggactaccgtcaccaatcttaagtttgaacatttgacagctctttatcagtttaaattcaccaatcgaagaccggatgcctataaagtgacaaaggtggttgtttcggctgatgctgctattttcccaaaaacgttgacagtttcgggagaagagaaaacgtatggtgataaaagtaatagtctgactttgtctatgacaagtttggaaatggcaaagaatgaagttgcatacggttatttgagtttctttccgatagcagacatgacaaaggatacagaattaacttttactgctacgatagaaaaagtgggagattcttcctctacggaaacaatagagaaaaaaggaaagatcagtgaactttataatgccgaatcggtggtagcaggagatgaatataaatatgtggctggaaagcgatatggtatatcatttatgctggtggcagacttgggatatgaggagactgaagcgggtaagtatttagtcaagaaagaagacgggttgataaatttggcaagtgaaccgactgttatgacgaatgctgctacggtaattacattagatgctgatcttgatatgtcgactaaagaggcatgggtaccggttacggagtttaaaggtatattggacggcaatggcaagactatttccggtcttacaattgaagcaacaggaaacgatgccggtttgtttataactaataatggtatcattaaaaatttaacctttaaagatgtaacggtgaaacaagtgtcaggcgcagctggagcatttgcagcaataaataccggaacgattcagaattgcgtcattgatggaggagcgttgactgtcaatggaacagatgctaagttgggggctattaccggacataatcagactggtgcgtcaatgataaaggattgtaaggtaaaaggtaatgtggtactgactgttgccggtggtaaagtaaatgctggtggattggcaggtgtgaacggatggtggtctaaggcacaaatacaaggttcttcgattgacaaggaggtatcctttgtatatagaggtaatggtgaaggtgccatcggaggacttgtgggttggaatgttcagggaaccataactggctgttattctttgatgactattactgcatttacagctgtgaatgccggtggtctggtgggaggaaacgaaggacctgtaaccgcttcgtttgctgctagtgaaatagtggccaaagcgtccggaaatattggcggtttggtgaaaaatggtggaactttgacaggatgttattcaacttctgtgctttctggcactgcttctgttaccatttgtggaatatcaacgggatcagtgacagcaaacgaatgttattttatgtccgacggagtttcgaatccgggtggaaacttaccaacttcaactaaggtaagcgatgctgctgccctgattgataaaattgcatccatgaatcaagcgatagctggctctggttacaagtatgttgaaaatacaggaaccgacagtgccagagtacctttactcattcaaccggatgaataataactgacaggtattagtttgaatccccttatttatccttgttttgtatatgaagaggacaaatagggggattcgtatctggaatatactatctttgtgtgtcgaagacatctttgggttgattgcgacatacaacatgacattcatcgtaaaataaaactttatatgagacgaatctttgttagcttactgcttttatctctgttttttatgggctatgcccatgagccggaattttcaacagccggtttcttccggttgccggataccgggcgtgatgtgtactcgatgaatcctgcctggcgtttttataaaggaagtgcggtgggtgccgaagcaaaagaatttaacgacaaagcctggcaggtggtgtctttacctaatggtattgagtatcttcctactgaggctagtggttgcatcaattatcagggggaagtatggtatcgtaaacactttactccatccgaagcattgaaaggaaagaaactgtttctccactttgaagccattatgggtaaaagtaagatttatgtaaacggtaaattattggcagagcactttggaggctatcttcccgtatcggtagatgtgactgatgcattgaagtggggagaggacaatgtgattgcggtgtgggctgataatagcgacgatccgacctatgcgcctggaaaaccacaagatgtgttagattatgcctacttgggaggtatttatcgggattgctggctgattgcacataattatgtgtttatcacggatccgaattacgagaacgaaatagcaggaggcggactgtttattgccaccgatcgtgtatcggagcaatcgacagatattctcttgaaagcgcatatacgtaatgaagacaaacagggctttgcaggaaaaatttcctattctttagtagaccgtgcaggaaaagaagtggcatcgtcagatgtgaaactgaatatccgtaaagggactgcgacaagtcataatggaaagatgagagtgaagcagccgcatttatggactcctgaatcaccttatctgtataatctgtgtgtgcgtatttatgataagaatggaaatgtagtagatggttatcgtcgtcgtgtcggtatccgtagtatcgaatttaagggaaaagatggcttctggctgaatggaaaaccttatggtaaacctttgatgggagctaatcggcatcaggattttgcagttgtaggaaatgcggttgccaatagtattcactggcgtgacgccaagaaactgaaagatttggggctggaagtaatccgtaatgcacattgtccgcaagatcctgcttttatggatgcttgtgatgaacttggtctgtttgttatcgtgaatactccgggatggcaattctggaataacgaacccatttttgccaaacgggtttataatgatatacgtaatatggttcgtcgtgaccgtaaccatccttgtgtatggctgtgggaaccgatcttgaatgaaacatggtatccggaagattttgccgggcgtgtgaaagggattgttgatgaggaatatccttatccgtcctgctattccggttgtgatgtgcaagccaagggctcgcaatattttccggtacagtttgcccatccgatggatctttcaaaacgtgatcctaaaattacatattttacacgcgagtggggagataatgtcgatgattggagttcgcacaattctccaagtcgcacagcccgtaactggggagaacagcctatgcttatacaggctgctcattacgcttctccttattataattacatttgctatgatggtttgtataaagagtctccctgccatgtgggcggatgcttgtggcattcgttcgatcatcagcggggataccatccggacccgttctatggtggattgatggatgtattccgtcagcctaagtattcctattatatgtttaaggcgcaacgtccggctgtcgtttccgagagtttggcagaaagcggaccgatggtttatatcgctcacgagatgacaccgttctcaagcagagatgtaacggtgtattccaactgcgatgaagttcgtttgactgtgaataaagatgggcaaacttatacctataaaaaagacaagacacgaaaaggaatgccttctccggtaataactttccccgggatatttgactttatggttgataagaagatgactcgtgaaaagcatgatgcggacgtctatttcctggcagagggactgatggatggcaaggtggtggctacacataaagtaatgcccgcccgccgtgcagaacagattcgtttgagagtagacaacgaaggaatcggactgcgtgctgatggatctgattttgttactgttgtggcagaaatcacagataagaatggaaatgtaaagcgtttgaataattattatatcaagttctttgtagaaggagagggacgtattttgggcggagctaatgtattggcaaatcctgctccggtgaaatggggcagtgctcccgtattgatccagtcgaccacgactcccggaaagattaaggtaagagccagtgttttgtttgagggatcacagatgcccgtaagcggtgaactggaactaacatcttccgctccaatgtatccattgatatttgataagaaagaagaagcgttgcctaagccatccgaatcgttctccatggacaagaagagtgatgctgaactggagttggaacgccgccgtcgtgaactgaatgaattaaaactgaaagaagtggagcaacaacagacagatttcggtgagaaagtagattaagactactcattacaacaatttactgttccggtgtgttttttagtaaccggagatagagagtaaatgatatattctttaggcacgggatacgcattccgtgcctaattttttatgtttcattttttatctctatctttgcgatacataataaataaggacgtatggaaaaaattgaaatagaagagaagattgtagctatgctaaagacagtgtacgatccggagattccggtcaatgtatacgatcttggactgatttataagattgacgtctccgatagtggagaagcggcactcgatatgacgctgacagctcccaattgtccggctgctgattttattatggaggatattcgccaaaaagtggagtcagtagaaggagtgaattccgccaccatcaatctggtcttcgaacctgaatgggataaagacatgatgagtgaagaagccaaattggaattaggttttctttaatcgttctatgtcaggcagtgctctgattttataagttgtaattcgttattagatctcgtaactggtaattaaatgaagaacatttattttctttccgatgcacatcttggttctcgtgctattgagcacgggcgtactcaagaacggcgtttggtgaacttcctcgatagtataaagcataaggcttccgccatttatctactgggagatatgttcgacttctggtatgaattccggctggtagttcctaaggggtacacccgtttcttggggaagctctccgaactaacagatatgggtgtagaggtgcatttttttataggtaatcatgacatctggtgtggagactatctcaccaaagagtgtggtgtcatcatgcatcgcgaaccattgactactgaaatctacggaaaggagttttatcttgctcatggtgacggcttgggtgatccggacaagaagttcaagctacttcgttcgatgttccacagcaaaactttgcaaacgatgttttctgctattcatccccgctggagtgttgaattgggtttaacatgggctaagcacagccgacaaaaacgggcggacggaaaggaaccggattatatgggagaaaacaaggaacacttggtactatataccaaagactacttgaaaagccatcccaatatcaacttctttatttacggacatcgtcacattgaactggatttgatgttgagcgccacctcccgtgtgttgattttgggagactggattaacttcttctcttatgccgtgtttgacggagagaatctctttttggaagagtatatcgagggagagacacaggtctaattatgtttcaacaaaataaaaggtcaggcataatacggaacaaaatataaaacaagggcacaaagaagtagcagaaaaataacctgccatctttgtgcctttgtcgttagagaatcttcaatgcttattagttaaatcttcctttctgctcaaaacacccgctcgttattcggcaaagttggtgtataagcggaactcgtgtgcaggaacactgatctttttttctccctccacgggattcccattttccagatatagataccatgtaccttcaggaatagtataatcgatagatgcattggtgaaattcgcatacacatgaagttgtttcccattcacagctttcaatgtcagtgtacgtccattatcccaatcattataactgactttccaggtaaattgagaagaagcgttgaataaatcggagtgtgttgtccgtagagtgattagttttgtataaatatctaccaagcttttacgctctgtctgatattcccaaaggactggtttctttccggtacgtccattttcgtctattgaaatatcataccccatttcgccgaattgccaaagcattttcggacctggaaccgtaaagaagaatgcggcgttggatgataactgtttgagccgttcggacaggttggtttttaaggctccatttccgtattcaatctgtttataggcacaccgctcttcgtcatgactttccatatagcccacaaattgattcggacgggtggtgtcatataatccggagaaatcactattatctttccagcccatagccgactgacaataagaatggttcatattcctccaaaaatgaattccttctgtggctaaagttgtttcttcatttgcacagaaatgttccatggtaaccattgcatcttctttgacagcttttacggcttcgtagtattctttcagtactgatacacgagcagggtcggttgccgccaaatcatcatcacctgttgtctgtttctgtgtgaaacctttggtgaaatcgaaacggaaaccgtcgatgtggtaagtatctaacagatatttcaggttgcgtttgacaaaagcttttgtttgttctgaagtgtgattgaaatcatccggtgaaaaaacatacttctgatgcggtgttacagcgttcagccatggattcttagtggaagggcggttattaaacgtatcccagtacatacgggcaaacggattatcattgttcgtatggttgtagactacatcgaaaataacggcgattccattctgatggcaggcgtcaataaaagctttatattcattttgagttccatacgaggcatccagtgcaaagtatagtccggtgttgtatccccaactgtcattacctgcaaattcttgtacaggcatcagttcgatagcatctattcccagttcttttaagtaaggcagcttttccattgctcctgccagatttccactggaagtaaaatctcgcaacaagagctcatagataaccggattttctttattcttcatctcaaattctccggcactccattgatagggttgtgggtttgtgcttacgactgatacgtaaggtgcttgtgcgccagtgggaaagttggtatccactcccttttccaatgcttgctcacaataaggatcgcacaagtaagtaccgccatccgaagcactgtacacaaagtactggaactgtgtttcaccggcagtcaattcctccagagtgatccaccagcaatggtttgtttcgtcatatttcatcatgtagcgactatccagtttccagttgttgaaattacctgttacaaatacacaatctttatgaccgccctgactgtccttatcatataatacaagcgttatcgaagtggccgaatggatatgaataccctctttttcttctccggatatggggagaggggctttttgcggttcttcccagataaatccgttttgactatcttctactaaagttgcgtaatcgtaggtttgttggctaccttccgcatcacgtacaatcaggttaatggtctgtaagggagtagatggagcaacagaatagaaatggcggatagatgaggaaagggtgatactccacacattgtcctttgtctttttcagtctgtatttattctgattatctccccatgtaggtgcacctgtccagtttgctcctgttccggagtgtaagtacaagtcgtcagcgtaaccatagaagttacttccttcgggtgctttgaaggtgatagtcagtggttcatccgctttaggaatagccggatcaaaattaaatccgtcgtggagaacttgttcttccggggcaggatcagttccggacgaaggacgctcgcccggcatcaacggatcatcatctgaacaagctccaaagctgttgagtatcagcaataaaaggagccaaatatatttaaagtctttcataagccttattttagaattcttcttccaatgtagtggtactatatttagctttgagtgtgtcagatttcgatcatatctcaaatctcctctttcccgaagagggagacttgagatatgatcgtaattgattctactcgttgtgctgtttaagagtgtctgatagttattcgactttacctttgcctgtcgtaaagttaatatggactttctgaccggcttttacattacattcgtagccaagttcgcttagattatccgatacgttcttattctcacggtaaacgatagtaccatcgccttcattagccagatcaagtgtaaattcgctcttccaccagcctccggcatctacagccgtagtagaaatacgtgccatgcctgtaacggttgctgccggtgatatgaagtcgcttgttttatcggtcggaatcctgaacaaggtcgtttcatcgcaattccacgaattgttaattacacctcccaacaggtaaacttccggcaaacggaatgaaattgtttttccttctgtagtcactgcgacaattaccagataccatccggatttaccaatgccaatattgcctcctgaggatgttaattcggcgaaatcaattgcttccggagataagatttcttcgtcataaccaaagtctccttcccattttctaaccggagcaaacttgatttggtctcccgccgtataatattgtatactccagaacattccgggagtctgtgtgacaggaaccatttcaggagctactgcccaatcccacccaagactgtacggagatccattgatgtacatgtgctcgggtagatcctccttgattgtgtatgtataatcttctacattaatcgtaattttcattttctttccgccggcgcaggtgagattatccgggtcggctccttctttatccctgaaagccaataatcccggatccggatcttctattactttggaagcacccaaggctctttgacaggcatccggagcttctatcgcacttcccgggacaatcttgaaatcaaacttctcttccgactcgacgactactgaaaagagatactgattgtctttgtctacttcgagctttgtggctgtcgatttgtccatctgccagctgtttagatcacctactatatagtattccgtatccacagccggagttgcgaccggagtgatggcagattgcatttccgggtattcagtcagtgaagttgcttcaccgttggttgtcatgactaccggtgtcagctttaaagtgacttcgcgctctaaagatttttgtgacttatacaaacttgccactttttggtcaagttctgtcaacctgacttttatattcccatcttttacttttgacggtagatttaatatctgcccttcggcaactaattctatattacaagctgtgagtgagaagttttctgcaatcgaagaaacagaggcgattaccacagaatcgcccggctgttcttcaagtttcatactggcaaccggagttatatctaccattgcagttatagcttcttcctggggattggactggggatcagcccagtccttaaaatcttcatcgcaagcggtgaaagctgccgaagcaagcaacagacacgccatatatgataatcttttcatgatattcagttattaaagttaacgattattgagtaacggaacctgttttctgaacaaagttcagatttattttctgccctgccttaacgtttatcgcatattcaggacctatttccgaccaactgtcaatcacacttttgttttcacggaacacgatttttccattaggtatagcgaactccgtacgccaccagtcttctcccggaactttgacggacatacgcaattctccgcctccggtgcataccggtgaaacaaagtctgcatctgccgttgttggtgcttggaatttgcctttatcgccgaatgtccaatctcctatagcattgcctatcagacaaacttcgcccggagcaatatccagcgtaaaggcataatcagtccctttgatgcttacagacatgatcactgtataccagcctgtgacattaacgctgatattttgtccgccaaatccatcatccgatccggtgaatgcatccgaggctattgtcagacgtggatcgttgaatccgatgtattctccttctttagtaccgaacttgaacatatcagtgcctccgaaatagaataaaccgaagaacttggacattccgtttactgctgccaaaggcacccagttgctccaattactacctgccatcgagccattgataaatatactggaaggtaattcgagaggcggtacagctttatatcccaatactttgggaagttcaattacattcgaaaaagcgatgccacgaccactattggtcagttccgctttcaggcgtacataaacgggtatgggagtggtcggaaattcttcatcggaggatgcactccacaagtctcccagtgccaatgcaaattctaaagctttcacttccattttggcagaagaatgggtagtacccaaagttgtataattagcttccgtatttgtctctgcatgagcgtcaacgaaattttcttccagtgaaatttgtactgaataagtggttgccatcggaatcccgtaatccggttgtgtacaggttaattccaatgattcggagtttttaaggtcgtacacgttgttggaagcaaaagctggcacattcagtacgaacgtatccggttcgttcaacacagggttgctgtcacggtctgcttcacaggcggacagagctagtagccccattgtcaatgtaaatagtttatataggtttttcattgttttcagtctttaaaacgtgaataaaggttctatcaatatcccggattctgagtcatatttgtattcgtcagcgtttctgttttcggtatcggatagagattatagatcgaactcacaccgtttccttcaaaggaaccgcctttccaatcccagaggtaggtgcttgaggtgaaatagccataacggatcaaatctgtgcgtctgaatccttccagatacaattcgcgggcacgttcatccagaatataatctaatgtcaggttattggcagagggtatttctgttgctttggcacggtctctgagggctttgatatccaaccaggcattttgttgtgcatttgcgccgcctgctctcaaataggcttccgcgcgaatcagataagcttccgccaaacggaagaacggaatgtccgtatcaggaattttagcatcgtgagcgggttgtccgtccgagcgcagattactccatttcataaatgaaagtccgtcggtgaatttacctacactttccagttcggctttgcgaccggttgtatagaacaaggcgcgttcatcttttgcagcagcctgcacatctctcacattctgccatttattatcggtatattcggtgaaaggaatatcctcactgtttgcgaagaacttgtcaaccagtgctttgcgtgtacggatacattcccaagggtcatttgttccgcgattcggcatgtcgctcttttgcgttgcagcaatcaggaagtaacttcctccgtaactctttgcttgtacaccatcctgacggatagaaaggatgatttcttttttagcatcgggattttcatcattgtctgccataaaaagttgttcgtaatttccacacaatccgtatccattggagggatcgagcactttgccggcataggtgatagcatcattccaacgcggttgtccggtgtatacttcggcattgagatacaaacgggcacgcagcaaccagcaagcagctttgtcggcacgtccgaaaggagcttgacgcggttcgctcatatcattttcgatgctttccagttcgctttcaatataagcgaacagttcggaggccgtcttttgaggaggattctctttggagaagtgttcggtgaaaggagcttttccgaaggtgtccatcagataatagtaaaataaggaacggagaaaacgggattcggcacgttgctgaacggaggtagcatcctcttttccggcgatctgatccaggaagaaattgcagagtgtgatattatatgctaaacgattatataatatttctgtctgctgatgagaggagttccaacgcatataagttagttcggggataccggcattttcttgccaggtccatatcatctcatcagtgccatattcattgttagtgaaaagagcgcgatagaaacaggattgaccttcgtcctttactgcgatatccggatcttcgctcaatttttgtccggtaagtcccagtgaagcgtatagtttggtaaagtacatatcttggtcgaaggtggcagtcatctgaggatcgattggagatatatccaggtcattgatacaggaggtcattccggtggtcaggctaaggaacaacgctgctgaaactattgattttatatatttgaacttcataatagtctactttttaataaattacaatcttagaactgaagacttagcccgaacaggatagtgatcggatgaggataaatgttcctgtcaatacctgctactccggcatcatttcctgaactgataaccgattcaggatcgagtcctgtatacttggtgataacgaagggattctgtacagtaccgtaaatacggccgttgatacctttataagcctgggacttcagtaaatttttgaagctataacctactgttatgttatcacaacgcaagaatgaagcattctcaacgaaacgatcggacagataatagtctccctttccttcaaatcccagattcacggcagctgtcgggcggttggaatagtatccatgattaaagattcctcccttgccgacactggatttactggccagtacgtcattgtacacatagttattcaggctggcacggagggcaaagcttaaatcccaatttttataagtgaatttggaagtcagtcccatcaatacgtcagcggcaggttttttatagatatatttgtccgaagcgttgatgacaccatctccgttacggtctacgaacatgttttcaatcggttttccatccttatcatacacttgttggtaaacgaagaatgagttcatcggataacctactttctgtacctggcaggttgcaccgctaataccagtagatacacctccggtttctacatagtaattagaatcatctcctccggtcagtttagtgatttcatttttgttccaagtgatgttatatcccaagtcccagacaaaatctttggttacaataggtttggcattgatggtgaattcaagccccgtattttttaatgaaccgatgttgctgatcagttgggtattaaagttagtccccgccgcaatctttacggtattgattaaatcgtcggttttccggtaatagtaatccatcgagccggagatacgtccgttcaggaaagcaaagtcgaaacctgcgttataagtcgttgtctcttcccatttcaggtcttcgttataagctttaggacgcatagtgccataataggtatccccgaaaggataataacatccggctgcgttgacgcggtacagtgccatataagggaaatcataatcgtcgcctaagttctgctgacccgtgataccccatccgaggcggagtttcagatctgacaatacttctacgtttttcaggaaattttcttctttcagtttccatcccaaagcaacagaagggaagctactccaacggttgtctttagagaaacgggaagaaccgtcctggcggaaagtggctgtcagcaaataacggctaagtaatgtataatttacgcgggcaaaataagaaactaatgtactgtgatgtccccaggctgtttgtgagcgcagattcggattgtaggcttcgcctgttaacggatttgttccttgtccgactttatatccggtatagtggaaatgttgctcttcaccacccagtattacgtcgacataatgatccccgatttctttggaatattgtgcataggcattcaccgacaggttatatttgtagccgtagtcagtcccgttccaaccatagtaataagagcccggggcataaggtgaatttacattcttttccttaccttccgagtagtcaccgcctacgttagcatggatatgcaggtcagggaggaagtggaatttatagtctacttctacattgctgataaaactggtgtttctggaagtatgtttctttagtttcagtagggaaacagggttggcggttgaattactttccagtgtaagcggccattccggatcgttatatgaactaccgtcactggtcggttggtagaatccaccgaagtttttgtacatgtccgaagagtcatatacaggttgggtcgggtccatggtcaaagctgcgccgatagccccgtcgtcagcataacgttggttggcccacatcattttagcattgatattgaacttcaggtgatctttaaagaaagagggtgtcagattgacggaggcggtataacgctcgaaattagatgtcatcaggatcccattctgattggtgtaaccgaaagaaacacgataaggcatatttttcaaaccaccgcttacagtcacgttatggtctgtactaacggctgtctggaaaatttctttctgccagtcagtgtttgcttcaccgaaggggcttggagcatttccttcaccataaagtttggatacgtatcctttgaattcattggcatccattacgtctattgtcttttgcagtataccggcggaaacgttaccttcatagttcacctgtggtttgctgcctgctttccctttctttgtagtgatgataatcacaccattagaagcacgtgaaccatagatggcggtggccgaagcatctttcaaaacagtgaaagtttcgatgtcattcgggtttaccattgccaaaggattagtcaaaccttgcacaccgctattatccattgccagtccgtcgataacgatcaacggatcgtttttggcgttcaatgatgaaccaccgcgaatacgaatcgtagctcctccacccggagtaccgctggaaattacattcacaccggctattttacctgttatcatatcctgtgcgctggtggttactcctttgctgattttatccggcttgatggcagtaactgatcccgtcaagtcgtttttctttactgttccgtaacctacaacgactacggcgtccaatacttgagagtcatcttccagtgtgaccattaccgaaggagctgctttaatttctgctgctttgtaaccgacgaatgtaatggacagaatagaattttgaggaacattcaatgtgaagttaccgtcaaagtcagtgatggtacccgttgtggtacccttggcaatgacattggcgccaatcacgggttcgcccatagcatctttcacatgtcctttgactgtgatttgctgtgcataagcgcccagtgataaaaacatccctattaacaaggggagaatcgtttgaacgattctaaatttaacttgcttcatgcatttaaaaaattaaagttaacaatatagtaatattatttctctctcttaaaagtttctttaaaaatacctattgaaaacactttttttaagactatcctttatttatagtcttttcaatcccttaacctctgatttgtttttcacctctttgatactgattgcgtatccaccgccattggcagcgtgcagattcagtttgcttttattattcaagataccttttttgatggtgtatgcctgcgggttatctttccagtcggcatctttggcatctgcgtatacggtagcgacgtattgttttcccggttccaggaaatcgaacgttaattgggagtcgtggccgttttcaccggctgtgcagcctatgtaccagtcgtccgttccttttgctttgcgggcaattgtgatgtattctcccggttctgcttccagatagattgttttgtcccagtcgagagcgacgtctttgataaactggaaagcatccataaagcgttcgtagttttccggaatatcggcagccatctgcaaagggctatacatggtgacatacaatgccagttggcgtgcaatggttgaacgtacctgggagttgtttgccggattcatctggttacagtgagtctcgaagatgccgggagtgtaatccatcggaccaccgaccaggcgtgtgaaaggcagaatcgtcgtgtggtatactttatttcctccaaatgattcatattctgttccacgtgcggattcattaccgatcagattgggatatgtacggcagataccggttggacgggttgcttcgtgtgcattgaccatgattttataatcggcggcttttttcacggcatacaggtaatgattattcatccattgaccgtaatgatgttctccgcgtggaatgatattacccacataaccgcttttaaccgagttatatccattgtctaccatgaattggtaagctttatccaggtgacgttcgtagttgcgaacagatgcagaagtctcatggtgcatcatcattttaattcctttgcttgcagcataacgatggatttcctgtacgtcgaaatcaggatatgcagtcaggaagtcaaatacatagtctttgctgttgccgaaccagtcttcccatccttcattccaaccttctaccagcactgcatcaaatccgttggctgcggcaaagtcgatgtaacgtttcacgttagctgtattggcagaatgtttgccgttcggtttggttttggagtagtctgtaacgccaagtttcacgctggtcagttcatctgtataagcccaggaaccttttccggtaatcatgtcccaccatacgcctatatatttcaccggtttaatccaggaggcggcgtctgcaatcttacaaggttcgttcaggttgagggtgatgcgggaggcgagaatgttacgtgcatcatcactgacgatgatcgtacgccacggagagttgcacggagtctgcatgtaacctttatccccttttgcatccggtgtcagccaggattcgaatatcatgtttttgtcgtccagattgaggtgcatacaagaataatcaatcaaagcggcttcgtgcagattgatgtataaaccatcatctgttttcatcatcagtgccgtctgtacacctgtcggtgaaaatggggtttgagaagaatttggagtgatcgcctgttgcatcaaacctctgatttccgatagacgggagatggtgtagtcgtactcttgagtgtcgtaatcgcccggtatccagtatgcgatatggttgcctgccatggcaaattgggaatgttcttccttgataacgaagtagttcagtgatttctgttgcggaaattcataacggaatcccaaaccatcattgaacaggcggaagcgaacaacgatggaacggtcgttcattggctgaaacagaatgactgccagttcgttatactgattgcggatttccttttcttctccccagactggttgccaggtttcgtcaaaggtagtcgtttgcgcatctttcagcttgaagccattataaagattggatttagaatcgagcttggtgaggtctctgcggtctacccagtcaaagtcggttctggtattatcttcttttttcaattccagtccgagagtgctcggcttaattaccaccttgcctttgtaagtcaagtcgtaggttggtgcgccttctttgttaacctgaaaggtcagaaccagattgccatccggtgaggtcagtttctgttgtgcattcgcaatgaatgagatgcaaaggaatgcgatgatcgaaaaaaactttttctttttcattctatttatggtattaaattgtaagctaaccgatatttctattcctgtttgtttcggatattgcaaatgtagcaaccaccttcacttttttgtttgattagaataaaaatacaagtttgtataaatgctagtatcttgttttataattgtttatctatctgatttcattggataaatataagtcgtagtgaacttgcttagaaggctaaaaggtatatcccacggcttggaagtgttaattcatttcttaattcaatctttttgtctgtgagcaaatcatgagcagacgaggtggagagtatttcctgataaggatgtaagtcaatagtctgttcccggtcgtttccattcagaaagacaacgactgattggttaccgtatttgcgttcataaacataaatgcctttattgggtgcgaaatgttttagtttgcctttggcgatgacttcatttccttttctccattggagcagtttttgcataaaagagaaggcttcattttgttgcggagtacggttggttgcttcaaaacagtttttggcgtcattctgccaacctcccggaaagtcacatcggagtaatccgtctccatttgctttgtcggctgccatcaggatttcagttccataatatatttgtggaattccacgggtagtcagtaagaatgtcaaggcttgtttatatcggttcaggttcttggtatcttcctccgaacggtagaaacgggaagtatcgtgattatcgaggaaggtcagcagactcattggatcggcgtagacaatatcctgtgagaggtattcgtagagtctgaaaagtcctccgttccattcggtggtttcttcgtcgaaagctttatttatttcttccatcagtgggaaatccatgacagtaggaagataactgtttttcggataagcaagtttactgtctttctgccagtaggagatcagtacattgctgcccagccatgtctcaccgacaatgttgaatgaaggatattcatcattgaccgctttgcaccaatgcgccatcatttcaaagtcggcgtaaggatgtgtatcctggcggattccgttgatacccgcatattctatccaccagatactactctgtatcaggtaagtggctacgtgacggtttcgttggttgaagtccggcatagtcagtgtgaaccaaccgtcaatggccagctttttatcataatcggaagtataagggtccatttgggtggcagttttgaaactggtctgcatgtagtttccctcaaagttgaaccaatctttggcaggcatgtctttgaatagataattgttcgaaccgcaatggttgaagatcatgtccatgactacctttagccctttagcattggcttcttttacgagattgcgaaactcttcattgcttccgaggcgacggtctacttgatagtaatcggtgatggcatatccatgataagagccttccttcatgtcattttcctgaatcgggttaagccatatactcgtaactccgaggtctgcaatataatccaaatgtttctctattccttttaaatcaccgccatgacgggcgaaaggttcgttgcggtctatgtttgcttccaacattccgggaattatatcattggaggggttgccgttggcaaagcggtccggcataatgagataaagtacatcactggagttgaagccttctactgctgaagcattctctttgcgctgtttaagttcgtatggtattttagtctgttttttaccttgtttcaggagaatgtcgaagtgctgagggatagcttttgaaagatctaaatataagatcagataattaggattttcctgtttcaccacgtcctgcagggtgatgtcattagaagaaatacttacctctgcggatgatatgccatcgccgtatagaagtatttgtagttcgggattcttcattcctgcccaccaaaaggtaggagccactttctttatattggttgcggcgaatgcttgatgataacccgatagaagtaatagtaaaatagcaaataacaaatttcgtttcatggtagctagatttttaactgtttgctcggagaaccgatgatgcaaatgtagggggatgctgtgcacctttgtgagattagaatggaaatataaacctgttatctgactatgttgctgataattagttggatattctaataccttatgccgaaaaatacaagtgaaaatgaaaatagttatacccatatttttcgttttcattactatatttcttatatttgtaacatctttaaaaaggaaccttatgaaaaatctaaccctttatatgctatttcttcttttgctctttcctttttcgttgtgtgcaatgcatacggataatgcggctgctcttaaaaagctggatgaagttataagcaagaaagagactttccagattcggaaagagaaagagattaataacttgaaattagaacttgcccattctactgatcctgttcgaaaatatgaattatatgcctctctttttggtgcttatttgcattatcaggcagactcgtccttatattatattaaccgtgagatggaaatccttccattgttgaaccgcccggaattggagtatgagatcatcattaatcgtgctacggtaatgggagtaatgggaatgtatatagaagccattgaacagttggagaggattgatcctaaaaaattgaatgagtggactcggttatcttattatcagacgtatcgtgcctgctacgggtggttagcagattatacgaccaataagaatgaaaaagaaaagtatttgaagaaaaccgatttatatagagattccattattgctgcgatgcctccagaggcaaacaaaacgattgttttagccgaaaaatgcataatgaacgggaaagccgatgtcgctgtggatatgctgaacaatgctttgaaagaaattcaggatgaacgtcagaaagtatatatttattatactctttccgaagcttatagtatgaagaaagatatcgaaaaagaagtttactatctgattctgactgccattgcggatctggaaactccggtgagggagtatgcttcattgcagaaactcgcgcatctgatgtatgaatcaggagatattgaccgtgcctacaaatacttgagttgctcgatggaagatgctgtggcgtgtaatgcccgtttgcggtttattgaggtgacggagttttttccgattatcgacaaggcgtataaattaaaagaagaaaaagaacgtgccgtttcccgcgctatgttgattagtgtcagtttgttgtctttgtttcttctgattgctattttctatctatatcgttggatgaagaagttgtctgttatgcggcggaatcttagtctggctaataaacaaatgtctgcggtcaacgcggaactggagcaaaccggaaaaataaaagaagtctatatcgcccgctatctggacagatgtgtcaactatctcgacaaactggaaacttatcgtcgttcattggcaaaattggcaatggcatcgcgtatcgaagatttgtttaaagctatcaagtccgaacagtttatccgggatgagcgggatgaattctataatgagttcgacaggtcttttctgaaacttttcccgaactttatttcagctttcaataatttgctggtagaagaaggaagagtgtatcctaaatccgatgaacttctgacaacagaacttcgtatctttgcccttatccgtctgggagtagtagacagtaacaagattgctcattttctcggttattctttggcaactatctataattatcgtagccggatgcgtaataaagctgccggagataaagatatgttcgagcagaatgtaatgaacctataatgttattcacagatagcaatatgttattacttcgtaatatacgagccaataatgcttgtgtataaagcaaatatctacttttagtgttcaataatccactgtgcatctctcttttttttctacctttgtagacaactaatctaaaataaatatactagaaaatgaaaaagttagtctacacactgttctttgtccttatctccgttgtagccaacgggcaggcaaagtacgtattctatttcatcggagatggaatgggagtcaatcaagtaaatggtacggagatgtatcaggcggaaattcaaaatggtcgtattggagtcgagcctttgttatttactcaatttccggttgctaccgtagcaaccactttctctgctaaaaattcagtaacagactctgcagctgcaggtactgcattggcaacaggaaagaaaacttataatggcgctatttctgtaggagaagataaaaatgctattcagactgtcgcagaaaaagcaaagaaagcaggaaaaaaggtgggcgtaacgacttctgtcagtgtggatcatgctactcctgccgcattttatgcacatcaacccgatcgtaatatgaattatgaaattgctcttgatttgccgaaagccaatttcgatttttatgcaggcggtggtttcttgaaacctaccaccacttatgacaagaaagaagctccgagcattttccctatttttgaagaggcaggatatacagtagcacgtggttacaatgactataaggcaaaagctgcaaaagcagaaaagatgatcttgattcaggaagagggagccaatccttcttgtctgccttatgctattgaccgcaaagagaatgatttgacattagcacaaattacggaaagtgctattgactttcttactaaaggcaataataaaggctttttcctgatggtagaaggaggtaaaatagactgggcatgccacgctaatgacgccgctactgtgttcaacgaagtgaaagacatggataatgccatcaaagtagcttatgaattctataagaaacatccgaaagaaacgctgattgtgattaccgcagaccatgaaacaggtggtatcgtgctcggtacgggaaaatatgcgttgaacctgaaagcattgcaatatcagaaacattctgctgacggactttcacaacgtatcagtgaattgagaaaatcaaaaggcaataaagtcacttgggaggacatgaaaacattcctcggcgaagaaatgggcttctggaaacaattccctctttcttgggaacaggaaaagacgttgcgtgatgaatttgagaaatcattcgtgaagaataaagtcgtatttgctgaaagtatgtactctaagagcgaaccgatggctgcacgtgcaaaggaagtgatggatgaaatcgctatgataggttgggtaagtggcgggcactctgccggttatgttcctgtatttgctattggtgcaggttctcaactgtttggtgagaagattgacaatacagaaattcctaaaagaattgcgaaagctgcaggatataaataatagaactgtatgaatataaaaatagccggaagtccttggactcccggctatttttatatgtttttgcaaattatgctttcacacgtcctacgtaagaaccgtcacgagtatcgatttcgattgtttcaccctcgctgatgaacaaaggaacacgtactgttgcacctgattccacagttgcaggtttcagtgtgttagtagctgtatcacctttcatgcccggttctgtataagtcaccttcatctgaaccttgatcggcatgtctgcataaagtacagtttcagtagaagcatcagaaacaacttccaatactgaaccttcgagcaggaagtcaacaccattaatcagatcgtgagcgataggatgttggtcgaatgtttcctggttcataaagatataatcttctccttctttatacaaaaattggtatggacgacgttctacacgtacatcttccaacttttcaccgatgttgaaacggcgttcgagaacgtatccgctaactacatctttcagtttagtacgcataaaagtgttacctttacctggttttacatgcaggaattctacacagaaatagagctttccgtccatacggatacaagttccgtttttgatgtcttgagcattaatcatactgctatttttcttattatattattgttatttaattgttttcgcaggaattcgactgcaaaagtaatctaaatcggtaaaaaacacaaaaacttttgagcaaaaatgagttatctcttggttaatttaaaaaaagtgcctatttttgcaacccgattacgtagaataataacataaaaacaagatacagtaatgaaaagaacatttcaaccctctaacagaaagagaaagaacaaacacggtttccgtgagagaatggcatcggctaatggtcgtagagtattagctgctcgtcgtgcgaaaggcagaaagaaactgactgtttctgatgagtacaacggacaaaagtgataatcacttgtcatcaggaaacaaaaaaggcggagaatttaatcttcgccttttttgtttctctgtttttcaaggggatagtatgttaaaaagcggtattgtttgctcttatttatgactttttgcttttctttgtgagattaaataaaactcataaacgaacatacgcgatggtagagtatatccgggacatgaaaccccgtatcattataataaggttgttgaaatctataggagtggggattatagttgcagcaattctggcgatgataagcgtctttgcataataggtagggacatttttcatcgcctactttttaaaagttcaactattttgtcgtatctttggcgcatattaacagcaatgcgtatgactattaaagaattcttttcttttaaaaccaataaatatttctgggtgaatattatcgccatgattgtggtgatggtagtgatgatatttggtgtgttgaaatggcttgatatacatacacatcatggtgaaagcgtggtagttcccgatgtgaagggaatgacagtggaagaagctacgaagatgttccggaatcacggtttggtatatgtgatttctgataccaaatatgtcaaagataaagcagcgggtatcattcttgaactgaaaccgggagccggtgaaaaagtgaaggaaggacgtacagtatacctgacagtcaataccctggatgtccctttacgtgccattcccgatgtggcggacaacagctcgctccgccaggcacaggccaagttactgaatgccggttttaaactgaatcagattcaattggtaaatggtgagaaagactgggtgtacggcgtgaagtatcagggacgtcagttggctgccggagaaaagattcctttgggagcttctttgacattgatggtgggagacggctccggtgatatgtcggaagaagaggactcggttgatgtttccgtggatacggagaaaccggttacgtcggaatcatcacctactcaagatgatagttggttttaatagataaataacagaaacggactcgcatgatagaggaagaacttccggatgaactggagaatgatttggatgatatagaacctgtcggtgacgaatcccagctttacgaacacttccgcgtggttgtagacaagggacaggcgatggtcagagtcgacaaatatctgttcgaacgtattgtcaatgcttcgcgcaaccgtattcagaaggctgccgaagacggattcgttatggccaatggcaaaccggtgaagagtagctacaaagtgaaaccgctggatgtcattacggtgatgatggaccgtccccgttatgaaaatgaaattattcctgaaaatattccccttactatcgtttatgaagacccttatctgatggttgtgaataaaccggcgggattggtcgtgcatccgggacacggaaactatcacggcacgctggtcaatgcgctggcctggcacatgaaggatataccggattatgatgccaatgacccgcacgtgggacttgttcatcgcatcgataaagatacttcaggcttactggtgattgccaagacaccggatgccaaaacaaatctgggaattcaattttttaataagactaccaaacgcaaatatcgtgctttggtgtggggtgttatggaacaggatgaaggaacgattgtcggtaatattgcccgtaatccgagagaccggatgcaaatggcggtgatgtccgatccgacagtgggcaaacatgccgttacacactaccgcgtactggaaagactggggtacgtaacccttgtggaatgtatacttgagacaggacgtactcatcagattcgtgtccacatgaaacatatcggtcatgtgttgttcaatgacgaacgctatggcggtcatgagatactgaaaggaacccattttagtaaatacaaacagtttgtaaataattgctttgacacttgtccccgacaggctttgcatgctatgacattggggtttgtgcatcccgtcacaggtgaagagatgtattttacttccgaacttccggatgacatgacccggcttatcgagaagtggagaggctatataagtaatagagaattagaatgaaacgcaacatcgctatcgtagcaggaggagatacctctgaaatcgtagtttccctgcgtagcgcacagggtatttattcctttattgataaggaaaagtataatttgtatatcgtggagatggaaggccgtcgctgggaagtacaattaccggacggaaacaaagtgccggtggatagaaacgactttagttttacgaacggaacggagaaggttgtgttcgactttgcttatatcaccatccacggtacgccgggtgaggatggcaggctgcaaggctattttgatatgatgcgtattccgtattcctgttgtggagtgttggcggctgccattacttatgacaagtttacctgcaatcaatatctgaaggcttttggagtgcgcattgccgaatcattgttgttgcgccaaggacaatcggtttctgacgaggaagtagtggaaaagattggcctgccttgttttatcaagcctagtctgggaggttcgagtttcggagttacgaaagtgaagacaaaagaacaaatacaaccggccattgttaaagctttcggagaagcggaagaggtgattgttgaagcgtttatggacggaacggaactgacttgcggctgttataagacaaaagagaagtcggtcatctttccacctacggaagtagtgacgcacaatgagttctttgattatgatgctaaatataatggacaggtagatgaaatcactcctgcgcgtatctcggatgaattgaccaaacgcgtacagatgctgacttcagctatctatgatatattaggttgttccggcattatccgtgtagattacattataactgccggtgaaaaactgaatcttctcgaagtaaatactactccgggaatgactactaccagttttattccccagcaagtgcgtgcagccggactggatataaaggatgtgatgactgatattattgaaaacaagttttaagtattaagtatcaagtataaagtattaaccatgcggtttgtacgcagtctaatactttatacttattacttaatacttgagcacataatacttgagacttatggatctgacagagtttaatgaaattcgtccttacaatgatgaggaacttcctcaaatctttgaggaactgattgccgatccggcttttcagaaagctgctaccggtgctataccgaacgttccatttgaacttctggcgcaaaaaatgcgtgcctgtaagactaagcttgattttcaggaggcattttgttatggcattttgtggaagatagcggcagatcatactgccggactgacactggatcataccgccataccggataaaagtaaagcttatacgtatatatcgaatcatagagatattattcttgattcgggctttctctctattttgttgattgaccagggaatggatacggtagaaattgcgattggcgacaatttgcttatttatccttggattaagaaactggtgcgtgtcaataaatcatttattgtacagcgggcgttgaccatgcggcaaatgttggaatcttcagcgcgtatgtcccgttatatgcattacaccatttcagagaagaatcagtctatttggattgcgcagcgtgaaggacgtgcaaaagattcgaatgaccgtacacaagacagtgtattgaaaatgttggcaatgggcggtgaaggcgatttgatagaccgcctgatggaaatgaatattgctccgcttgctatttcatacgaatatgatccgtgtgattttctgaaagcgcaagagtttcagctgaagagagacatcgaaggatataaaaagacgacacaggacgatttgattaatatgcagacaggtcttttcggatataaaggcagggtacattttcaggttgctccttgtttgaatgatgacttgcaaggcttggaccgttcgttgccgaaaccggatttgtttgcccgaatttctgcttgtcttgatcgccgcatccatcgtaattaccggatatatccgggaaattatgtggcgtatgattggctgaatggcacaacggaattcgtgtccaattacacggaagaagagaaacagcagtttatgaactatattgaacaacaattggcaaagatcaagattccgaataaggatgaagactttttgcgtgagaagttgttattaatgtattccaatccgttagttaattatttagcagcttgccgatgaaaagaagaaaattacatgttgtttggttgtggggattgcttttcctgatgactgcctgtggagatgatgactattattatccttcggtgaaactggaatttgtgactgtagaggccggagaagacggtcgtatacaaacgcttattcctgataagggagaagtcttgactgtttcggaagaccgtacgggttctactatctctccaaacacttccagacgtgtaatgagtaactatgaggtgctttccggtgagaacactgctactatatattctttgcaatcgctcataacgccggtacctaaaccggaagatgatccgatttacaaggacggtataaagctagatccggtagagatggtcagtatctggcttggaagggattatctgaatatgattttgaatctcaaggtcagtacgggcaagggacatgttttcggtatagtggaagatgtgtccgaacttaaaacaaatggcattgtgaatatgttgttataccatgatgcgaacagtgatggagaatactataatcggcgtgcttacatttctgttcctttggcgcaatatatagatgaagagaatccgggtcggacgataaaggtaaagtttaaatattatacgtacgataaggatggttctccgatagaatctgataagtactgtgatcctgggtttgactatactccgggacagaattgaataatggagtgtatatgtttaaattgaatcaattaatcgtgggaatatttttatttctctcttcccttttctcttgtcagcagaaaggggattttcaatcaatgaatgtagaggagtttgattctcttatttagaatgaggatatacaacgtctggatgttcgtacacttgcggaatattcggaggggcatatcacgaagacgattaacatcaatgtgatggatgactcttttgcttcaatggctgattctttgttgcaaaaagacaaaccggtggctgtatattgtcgcagtggaaaacgaagcaagaaggctgcggcaattttgagcgagaagggatataaagtctttgagcttgataagggatttaattcctggcaggaagcaggtaaagaaatagagaaataaagtgctgatttatcagcactttattttttggggttatttcagtccttccaataaccttttcagaacgacagttgccgagatttcacggttggcagcttccggaatcacaatagattgcggactttcaatgacatcgtctgtcacaatcatatttctacgaaccggaagacaatgcatgaaataagcattgttggtaactgccatttggcggtcgctgacagtccaatcacgatctttgcttaatatctgtccatagttgtcgccagaataagcggcccagttcttggcatatatgaagtcggctccttcgaaagccttcatctggtcatattctacttttgcattacctacaaattgcggatcaagctcataaccttcgggatgagtgatgacaaattcgtaatccgttgcattcatccattcagcaaaggaattaggaacagcctgtggcaatggacgtggatgaggagcccaggtcataactactttgggacgtactgttttcttgtattcctcgatggtaatcaggtcggcaaagctctgcaatgggtggcgtgttgccgcttccatcgaaaagacaggacgtccggagtattggatgaattgattgataatagtttcctgatagtcaaagtcacggtcttcaaaacgggcaaaagagcgtactccaatgatatcacaatagcatcccataaccggaatggcttctaatatatgttccggtttatcaccatccataattacgccacgttcagtttccaatttccatgcaccttgattgatatccagtaccattacattcattcccaaattgatagcagctttctgtgtgctgaggcgggtacgtaaactagagttgaagaagatcatcattaaagtcttgtttcgtcccagttctacatatttgaagtgctcttttttaatttcgaatgcttctgcaagggctgattttaaatcgccaatgtcctgtacacaagtaaatttcttcatatcatttattttttaatttttaattagcttcgctcaaaaccttgtttgatttttaacatataggtatagtctcaatttcttctcgtttgtccatctccttcaatgacccatttgtaagaagtgatttcctccagtcccatcggaccgcgtgcgtgtagcttttgcgtgctgattccgatttcggctcctaatccgaattgtgccccgtcagtgaaagcggtagacacattggtgtatacgcaagctgcgtccacgattctggtgaataaagctgcacgttccccgttctcggtaacaatacactcgctatgtttagaactgttttcccgaatatgtcctaaggcatcttcgaagctctttacagtcttgacagccattttataatccagaaactccgtgccgaagctttctgcttttgcatgttccaggagctcggcaggatagcggccttccaatgcctggtaagcttgcggatcagcataaataatgacatggctgtcttttagtttctcgcaaatcagagggaggtcggccagtctcttctcatgtataatggtgcagtccaatgcattacatacgctaactctacgtgtctttgcattatgaataatgtctgctcccttgtttgtatccccaaattcatcgaagtaagtgtgacagatacctgctcctgtttcaatgacaggaatccttgcattctcgcgtacgaaatgaataagactgctgctgcctctggggataatcaagtctacgtagcccacagcattcagtaacgctgccgtagcctctctatcagccggaagtaattctacaatgtgtggattgattttgaacttcttcaatactttgtgaatcacactgatgatggcccggttggaacaatcggcgtcacttcctcctttcaatatgcaggcatttccgctcttcagacaaagggagaaaacatcaaagctaacattagggcgcgcttcataaatgattcctatgactccgaaaggaacgctgactttcgtcaacttcattccattgggacgaacactctctttcagcactttacccaaaggagaggggagtgttgctacattgcgtgtatctgcggcaatacctttcaaacgttcttccgtcagtttcaaccgatcgtacttcggatcatttttgtccatccgtgcgaggtctttttcgttctctgaaagaatgaaaggtgtttctgcaattgctgcgtcagctactgcatttaaaatctgattgatgacattatcattcagcagggctaattcccgacttgctacttgtacagcggcaaaggtctcgtttaaatttgtagtcatttgctccttttttgcattaaatggaaagataaactatgcaaatatagtgaatgatgtgaataaaacttgttgaaaatagaaataaatgtgctctttacttattcactggggtttttacaagattaatactaaaaaaatacgagactcaattctgaatctcgtatttttcatttatgcactatattggtatagtgcttgttattcgaactcctatttggcattatctcattgccatggaatgtcttgttcaatatcttctcccatttctcctgattcgacttcaattcctatgtcactaggtgttcctatatgttcgatattggttagtgcgatagaatgggtatagtttctcttgaatgtgatactgctactgatgattgtcttttcttctgctcctggagtctcttcccaaaatactgccacttttacattctctgttaaatgttgattatcaccagtaggtatattggcagtgagatttctcatgctgaccatttttaattcagattcaacagtcttatgaatatctgcattagcattcaaatagatgcttggtgcgtcttcaagttttattctaagacgtcctttctctaaacctgtttgtttgaattttactccgaaaaaacggcgatagagcatgatgtgattttgcatgccatctgtcacttccactttatcgtttaatccatgataacgttcgatgaacgggcggttgcaggcgtcttgtgatccgtttctcgtttgtattctcgggttttcaatattgtataagaatttgattccatctgcttgttcggcagtcaggaatttgttcaggcattcccctttgatttttccgctacgttccaaatcgaaaggggctccgaagaagcctttttcgtcttttatgattgagtcctttgcatttgcaatcatagagcaagagatgcggtaagtgtatccatcaataacttttatttttaggttattgggatctttcgccttgtctaactggaaaataccataagcgtatggttttgaagatggattctgtccctctttgggtgtcatggtaatggcgattcccactaatgtttcactttcattaattttggttggagttgtagcgcgtgccatgggcagttcggttgagaggtagtctccgtccagttgtaagttaagttcggaatacgtagtaggaggtgcctgatacagatctttctccttaatacatgattgtagagtaaaagctgtgaatagacagcctgcgatcataagatgtttgattttcatatgaatcttttttagtagttgttgagtatgataattatttccctatttcttgttctgattcttccatttctgcttcttcaccaaaagagatagtagcatcccctatatgctcatctatcttgactattttgactatgttctttttgtttcttttcattttaatactttgattggtatatagagaataccatttctcttcattggccgggcggtaggaaatagtgaaagcgattgtttcttcttccttaagtttggccgtataatagtcggatatatcgtacatagagataattcgttcctccgtccgggatgttccatctttggaatatagtagataaaatggagcaacgtccgctgctttaattttgatggagtcacccggtgcaagttcgtctgtaacgaattgtatagaataataagcacgtttcaatgtcattgaaacggaggtattcatattgggatttgaaaagtccaattgctcactgccgaaaaagcgtttgacggtagggtgagtactagtactatcgcattttatatgcatttctcctttgtaaatatgttggtgaaatgccccattgatattcaggggattgattgaaatctttaaatcgttgttgactaacccgttcacctctttctgcagagtagatgaaaaaggaagtccataaagtatgctgtcactttgtattgtataatatgggcggtctttatatcccaggaagctgcagtcaaagcgatacacatatccttcgattaacccgatttctactcgatatggattatcgaaaaggcctgaagcatagggctgaaaagaagtcaggccttttcctttccaaaaaacattaactgcatatattccgtcagccaccgtggaggtggaacggcttaaaggttgttcggctacttcaagaaaaggagctatatttaaactgacattaaactctctgccgacaggaaatgacggtgtactgtttacttcaggttcattcttactgctctcacaagatataattgagaatgttaaaaatatgagtataaggttccaatgttttagtagcatggggattatattgtttgtttagagggcaaatatactgctattaatagttttttgcaaataaagtccctgtatttatgttgcagatgtctatctataatacattatataactgaaaataaaagcgcttatcttcactaaagaagctaatattctacctgaataagagcttcatttgggtgcagaaatgaggtaaactcatacaattataattcaaaaaaacttccgtaaacattctcaactatacttatccctatgagaaaaaatactcatagggatgagaagaaatactcattacaatgagaactttttctcattgcagtgagaatatccccttgctagaataggatgaaacagtttattaccgtgcagtcatgaacaagattcacctctgtgtactctgtggtgaaaaccgtacagaaacaagctaattttagtctaaaatcggataaaacagaaattcttattattaattattcaatgtatagatagtcataatgtactactggtttctttccatgcttgccaatcgcttcttgtgcctgtttggagtcacagttcacttttccaacgccaacctggtttccttgaaagtccatgatacgtacaatgtcatctttctcaaattcaccttcaatatgagtgattccaatcgggaggatactgacagctttttcagagtttagaacttctgtcgcacattcgttgatgtgaatttcccctttggcaaaaccttcgctatgggcaatccactttttgacgctggataccggttcgtttgatggtataaaacgtgtacaaagagtttcttcaggatgctgtaataaatctaccagaatattatcccgcttcccgttggcaataatcactgtaattccttcatcagcaactttgcgggcaatattggttttcgtcaacatccccccccgtccgaaactggacttagttgtctgaatatagttggataagtctttgccgtgaccgatctcccggataacagaagagtttggatcggaaggagaaccattgtaaatcccatcaatattacttaggataatgagtgcctgcgtatccatcatcgaagcgatgagtccggacaattcatcattatcggtgaacatcagctcactgacggaaatcgtatcgttttcgttgacaataggaatgacattgttttcaagcattaccgtcatgcaatttttctgattcagataatggcggcgagttccaaaactttccttcgttgtcagtacctggccgacaggtatattgtgctcacggaaaagttcgtagtaacggttgattagtttggcctgacccacagcagaaaataattggcgctgatctacactatcgagttttttctgcggatgcacttcactgcgtccggaagcaacagctcccgaagaaatcaaaatgatttctaccccggacttatgtaattccgctatctggtcaacaagtgccgacatacgggtaacgtccagcgttccgtcgcggcgtgtcaatacattgcttcctacttttactgcgattcgtgtaaattcctgtttcatccttactaacgatttgaaagcacaaatatagagctttttgccgatatgctacctaaacaggctaaaaagaattatctttgcagccagatagagaaaagataaacaatgaaacatacaaatccacaagtagaacagatgacctccttcatcgtaatggatgtgttggagagggcaaacgaattacagaaacaaggtgttgatattattcatttggaagttggtgaacccgattttgatgtaccgtcttgtgtgtcggaagcagcaaaagcggcttatgatcgtcatcttactcactatacacattctttgggggacccggaactccggcgggaaattgctgctttttatctacgggaatatggagtgacggtagatccggattgcattgtggtgacttccggctcttctccatccattcttcttgcgttgatgttgctctgtaatacggatagtgaagtgattctttccaatccgggatacgcttgttaccgtaattttgtgttggctacccaggctaaacccgttttggttcctttgtctaaagaatatctgcaatacgacatagaagctattcgtaaatgtgtgaatccacatacagcggctatctttattaattctccgatgaatccgaccggaatgttgctggatgaaaaattcttgagagaagtggcagcactgggagttcctgttatttcggatgagatttatcatggacttgtctatgaaggacgtgcgcacagcattcttgaatataccgatcaggcttttgtcttgaacggattttctaaacgttttgcgatgacaggtcttcggctgggttatttgattgcacctaaatcttgtatgcgttctttgcagaagttgcagcaaaatctatttatttgtgcgtccagcgttgcccaacaggctgggattgctgcattgcggcaggctgattcggatgtggaacggatgaaacagatttatgatgagcgtcgccggtacatgattactcgtcttcgggaaatggggtttgagattaaagtagaacctcaaggagcattttacatttttgccaacgcacgcaaatttactaccgactcttatcgctttgcattcgatgtactcgaacatgcgcatgtcggcattactcccggggtggactttggtacgggaggtgaaagatatgtacgcttctcctatgcaaactcattggagaatatcaaagaaggactggaccgtatcaatcgctacctttctcgtctcggcttctgattagctcggtggctgcttcgtattcttcctctgtcacgaggacggatacggaaggagcgatatagggtgctaatgtccccataattccatctttgattacacaacggatattattgctttctaataaccctttaatgatctcggcttcccagggggatccggagaatacttctattgccttgctataatcttcttctttcatgatcttacttattaggggttgttatctacaaatataacaaaactcgcccgattatggatggattcaggaaaaataatgtaaactattgggttttcagggagatacgcagcattattccgcatttgtaaacgtgtgctttgaagctgttttttgaatagttaagcggaaaaattgctacctatccgttgcccattccagttgtatggagttgtttgaaaatcctttttgctccgaccataaagaacgcagttttatcattttggcttagcgaaggtacttattttttttgagatatgaaaaatataggttccggaagtcaatggtgatagctttgtctatgtttgacgatattttacatgccgatgattaactctgtctccgttaattttgcaaacaatggaacagattatgaatcaaacagatgtaaaggtttcgttctaccttaaaaagagcgaggcggatgccaagggaaattgtcccgtaatggcacggcttattgtcggcaagtactctgaaacagcattcagtgttaagcttcgtgtgccacagtctttgtggttatctggacgtgcctgtgggaaaagcgctgcggcccgagacataaataacaggctggatgaaatacgtgcagctgctttcagtatctatgcggaacaatccgcaaaccgtgaagttgttactgcagaagaagtaaaacaccagcttttgggaatggcttcggaacaggaaaccttgttaagctatttcaggcttttcatgagaaatttcgagaaacgtgttgggataaaccggacggaaagcagcttgaacggttatcgaaattcctatgatcatctggttcgtttcttacagtcacaatacaagttgtcagacattccttttgcagcattagaccgttctttcattgaaaaattcgatttgcatttgcgtacggaatgtcatttggctccaggaacgattgtaaatcttactgtaaggctgaaaacaattgtcggagaagcgattgcggacggtatcattacagcgtttccttttgtgggttatgaaccgacgcatccgcaatcggaacaaaaatatcttacaacagaggaattgaacagaatcatgaccacccctttgcatagtcgcaccctttatcatgtacgggatttgtttttgttttcctgctatactggtattccttatagcgatatgtgtatgctgacaaatgagaatctttcccttgctgaagatggcatttggtggattaggagttcacgcaagaaaaccggtgtagattttgaaataccgcttatggaattgccgcttcatatcattgaaaagtaccgggatgtggctcctgagggaaagcttcttcctatgtattccaacagttcgttgaaccattatttgaaacagatagccgtactctgtggcatagaacgcaagctggtcttccacgtggcccgtcatacctatgcgaccgaaatcaccctttcccatggtgtaccacttgaaacggtcagcaagatgttgggacacagcagaattggtactacacagctttatgcaaaggttacagacaataagatagatacagatacaaaagcattggataaaaaaattgctgagaggttttctgtagttatttgataatggcaaaaaataggattatgaaaagaaatactgataatatggaaatcaaacgtcgcagtacatttgcgatattgttttatataaaccgtaccaaaatccgtaaagacggaacatgtcagctgctgtgcaagataagcatagatgccaaatgggaacagataggaacgaaagtgtctgtcaatcctgccgtttggaatccggaaaagggacgggctgacggccgcagtgagaatgctattaccgtcaaccgggccattgatgatctgacaaaagaaatcaaggagcattataggcggattaagaacagtctgggatttattacggcagagcaggtaaagaatgctgtgatgggagtcggtcagaaaccgctaactctgctggctcttttcagagagcataacgaggagttcaagaagcgtatcggggtggatcggataaaggaaagttatgattcctacttgcgctcatataagcacctttctgcttttgtgcaggaaaaacgtggtatagaggatgttcttttacggaatcttgatcgtgttttttatgatgactttgaactgtttctcaggacgaacaggaacttaagtccgaagacagtacatgaacacctttatagactgaagaagatgactatgagggctgtcagtcagggaacaatacgccgcgatccttactgtcgtcttcatccggaattacccaaacggaaaagtcgtcatctgaaattggaagatctgaagacactgcttacaaccccggtcgagaagccacagcttcagtttgtccgagacatgttcattttctccacctttaccggacttgcctatgcagatttgaaaagactgactgttaatgatattatacaatctgaggatggttcgtggtggattcatatccaacgtcagaaaacagggacattgtcttctgtacggctgttggatattccgttgaagataattgaaaagtatcgggaacagcgtcatgatgacaaggttttcaatttatacaagcgtgagtatttcattatgcttacccgtaagttaggtgaggtatacggttttgaactcacattccataaggcgcgacacaatttcggaactcatataactctttcaatgggcattccaattgaaacggtcggtaaaatgatgggccatatgcgaattgaaactacgcagctttatgctaaagtcaccgacaagaaagtagatgaagacatgaaacgtctgaaggcagctggtctaagccaaacatccggcttatatgaggaggatattatagtaaggaaacagagacgaaaatcccaaagccagctatcagaaaataaagaaacgaccttgtaacgaggccgtttcttttgcattgtttcatacccatcgctgttcttccctgcatcttttatatgcgtcgtcaagaactttctgtatgtctgactctttgtaaagggcttttccctgcacaaggtagtaaggtatcacaccgagggtccggtattcctgcaaggtacgccggcttactttcaacagctttgaaagttcctcgtccgtgaggaaataatcactgtggaatgcgggtctcggagccgtccttattgcgtctatcatacgctccatgttttccagccctttgaaaatagtatcaatccgctggtcctttctgtctataagatcgtaactcatggctttcttttttgtgggtgataacttgattccaacatgttttgcacatcttccggcttgtagaagaacttgttcttgacccgggtgaaaggcaacagccctttctcacgatatacctgaagcgttctctttgatatgcggagaatcccgcatacctcctgattgtccatccattttttcagtcctgcatctttggccggattgcatataccagtgacttttttctctatcatgctgaatcggacaaccagttcgtcaaatgtccgtttgtctatacatataatttccatactgccgttttgttagaattgaataccgagttcctttttaatttttgccggaagtacctttcctttcctgctcaggaagtcctggacttccgaagccttgtaataggtacgtccgtcaatcatgtagtaggtgacgagtttcttctggcggtagcgtgcaagtgtacgcttggtaacaccaaggagctcgcacatatcctggttgtcaagcagcttgtcaccctcaagagcggccgtctgcctgttcatgcggttcagcctgtcatctatcctgtcaaaccgttccattatctgatggagcatcatctggaatgtctccctgtttatctgtatcataatgaattctgtttttagtgtaataattccattttttacaccgtgttgcgcaacaggtttcattatgatataggccaaaacatagaccaacggaacatatcgccacataaaagcatgacaagtcattgagtaataggaaaataaaaaatcagccccataaaaatgagactgatggaagtattgcaaatgcaatatgttgcaatgccttattgcaatgtcttgcaataaaccaggcgacaaattccgtttttgaatgttttggattttacggttttccactctccacgtggcagatgttttgagacggatttatggttcggacgagtggaaggaaacaggaaaatgatcatttcatctatgagatgataaactgagagaccacgcaaaagttctatgctttcttcgtcatgtatctcggcttgataaaggatggatgggtctgacatgtctttctcgcacatgaaatccacaagcggataacccggatagagccggcgggtacatttgtcgcgcccgtatgagaatccgtccttgtcgtctctcatccattgtaataaggggtcgtcttccgccggaatggaaccgtctaatgtcattgctatcagaacctgtaacttggccataccttttttcctctaaatgaaaagcgtgaaactcacgcactatcaggtagaggctctggtaagcccattgtagaatcatgcatgagctcacgctataggacatagcataagctacacgcaaaagcctctacaatatcaatttaccagatttctacctgagacgtcttgcgacttatgttgtaatgttcggcaaggcttaaagcaatgccgatattttctccttatgttgtgactgtcattcctatattacaaggatttccaatcatatgcaaatgtaggcattttattccaaacagaaatatggaatgacggttatttgtcattcaatccatattttttcattttccgatatagtgtggacggatcaatatgcagtatgcctgctgcttgtttgcgactcccatggctggttttcaatgcctgtattatcgagtgtttctcttccgcatcgttttcaggaaaaagattgatttcctcggtcgccgcttccagtttgatattcaggtcggcggtttcaatgagcggctgtttagccataagtaccgcccttcttatcctgttatgcagttcccgtacgttcccaggccagcggtaagagagaagcaattgttccgcttcagaactgaagccttctgtcggtcttttcagttctccggaaaacttttttctgaaatgatgagccaaagacagaatgtcatcggggcattcatgcaaggaaggcaggacaatctcaaattcgcatagccggtggtataggtcttccctgaaccgtttttcttgtattgcaagttggagatcttcattggtggcggctacaattcttacattagcccgcttttctttgttaccacctattgggatgtatgtgccttcttgcaaaacccgcagcagcatggcttggacgtccagggacaagatccctatttcatccagaaagagtgttccgccttttgccacttcaaaatatccgtccttgttggcgtcggcaccggtaaatgttccctttatgtgcccgaaaaagagggagggtgcaagctccttgggtatgactccacaattcacggcgacaaacggcatatccttccgctctcctatatagtggatacgctgtgcaaccgattcttttccggcaccgttaggaccaagtataagcacagaaatgtcaaatggggcgactgtactgaccagatgttcgacctcctgcatctgaaggctgtttctggggagcaaatccttgttcttgtcgcatatcacagatttgggacggaaaatatctttcagttgtctttgcaattcgtccatctgtaccggttttgccagatagtctttggctcccagttttatggcttgtacagcatccggtactgaggcatatccggtcatgataatgaaagggatatccatccgttccttccgcatccattcgagcaaagatataccgtccccttccggcaggcgtacgtcggacagcacaaggtcgaaactttctttcttgagcagttttcgtgccccaggttcatctattgttatctctgcttcataaccggatttttccaacctttttttctgttgcccggcaagcatgatgttgtcttcaactatcagtattctgtatttcattcatgttttcatttaattatgtccgtccatttacgataatcggctttttgtctcagatatcagccggtctattcttctgacaattctttccacatcattgcggaatgctgactcatccgtatcttccacatactcttcatagctgtacgattccagctcatgggctattcccaattgctcccacatcgggtacatcctgtgcagagtttcccatatccgcttccggtcgagcttttcctgactcaaagaatccagcaagtcagaactgttcctattggattcctctataagagtctccaaagtccagcgttcgtctcctgtagtgacatacagagcctcgaaatctggagaatgattatccattgttctgtcctgtccaatgagtgacgagagaaattcgagcaggtcccttgtatagaacggtttgtggatacagccggcaaatccggcttgaatatagcggtctgcatcgccgtcgttacgggcggtcattgcagctatgggaattgtccgtgaatttcctatgttggaaaggcgtagcagatgcaacaggtcaaaacctcccgtaccacgcatctgtatatcggtcagcaataggtcgtattctccggttctcaatgccttgaccacttcctgtgcattggtacaggctcggcatgagataccgttccgttccatcatttcaactgtgttgcgcaattgtatcggatcgtcatcgactacaagaacccgccgaggaagtctgaggtttcccgtataagtttctggcttgtctcttgcaggctcattggtctgcctaagcggaatttccaccttgaattcgctgcctttaccgatctggctcgaaacagagagtcttcctccgaacaggttcaccagccctttcgtaatggaaagtcccagtccgaagccttctgaatccaaatcaggagcagcccgttcaaagggctgaaaaatgcgttgtgttgtgttctcgcccattcctatccccgtatctttgacctttactgaaagagtatcttcttcataacttgccagaaatttgatataacctgtacgggtgaattttacagcattctccagaatgttgaccactatctgccttatgcggtctgcatcgccaaggacggtgatgccgcaccccataaaagccttgtcaaacatcaatcctttgtcgttcgccttgcgtgtgtattcttcagcgatactttccagaaaggattcaagatggaaaggaatttcgttcagggtttctttagcatcgtccagacgggagaggtcaagcaggctgttggcaagccgggtgatatgacgggatgattcaaggatgtttccgagataggcattgcggcgtttccggtcacgagtatccatggccagttcagcactgccactgatggcattgagaggtcctcgtatgtcatgggaaagtgtgatgattattttcttgcgcatgtcggagagtgtacggttttgtgttgccgtatcttccagttcagccttgtccctttccctgcggttaaggtcacgcatgatgataaggtgcgaaatgatgagcaggatgatggccatgccgattactcctgccattaaaaagaacgacattttctctgcttctgccatttttaactctctttgtgagaaggcagtctgtgcctgttcgtcaaggtcgtttatcagcttgttcaatgtcctgttcaattccctgttgcgcatacgcaggctgtcggcataaatgtccatttcgttcgcctgtctttgatgtattgctatcaggctgtcgctgaaatcatgaagttctttttgggatggcattacttgtatttcttcttttttcccgaagaatcctgcaatcccttttttcttttgttctatggtacggatatgtgttgcacgcctcgccacttccggcaactggtttaccagcacgctgtccgcttcagttcgccgttcaaacatttccattatgtgcagcaggtgtgtctccttttcggcaagcagagcacgaagagtgtctatctgttccgggcgtacatattcacggcagtgtcgtttaagcgagttcaacaaactgtcggcttgaagtcggtggttacgatagtacagatagtccgctttgttccaatttaccacaccctcacccaatgtggcgagccccgtaatacggcgatgagccgtgttgataccacgacgtacaaggtttatgtttgccgtctctgcctcaatttcgcgcatccgctgccgttcatatatcaaaatggcggccatgctaccgatgaccgccataagtatggcatagccgaaaaatattttatatcgcagcgacactgtttgttgatgaaaaatataattggttaactaaatatcaatatcacaggatagtgatccccacccatcatatgatatcttagtacacatgttcttagctgtaatctgctatcgataaggaaataatctaattctcgacctgaaaaatgtgttggcataccacaacaagcaaaattagcactatttcccggcctactcctggtacctgtggtcattattcttaaatattctgataattcgcttggcgttgaattcatatctccgccaatgatgaaaggagatactgcatgacgtactaaatctcttatatctcctacagcaccagacccagattcgcaatgaagggtataaatgttacatccattataatttaaacaaattgcagatcggcctgttcctgatatcagataatgtattgatgctacaaaattcaaatccgcaatgatacaagtattacatctacaattataagcacctgcatgttctaccacaacatagtggtatctaccactatgttgtgcaggcagtatgaaattaccacattcttgtatcataacgacattacattgttctgttgttaatagatgattcaatatatttaatttaatagcatcattaagaggatttccttgggaattccatgtacaaattttcatatggctgtttttagatgtttgatgcatttattatgttttcataataattattatcaaatttgaacgggactttatccatcccgttctatatgtttatactctatttactgctttctgtatttataggctcgatacaggaagccattatatccatcagttttgacagaccttcggtctgtggttgctggctggccgaaacatgtatctggtattttgccgtttggttggtcatgcgggtgttctcacgggcggtcgtgactttgccgctgatttccgcatttataaaccaacgttttgcagaggcttttgcctctacttctgcgttggtagtgctttttacgtttgacgtatcggtaacctccatctggaaatcgacatccacgcgatctataagcagggcaggaataggcaccaatcctataaacggagcctttaccgtttgttttattgttgtcattttttcattctgctgtatcggtctttcgacatcgaattccaatatacgcgctttattgccgcttttaccatcaaatgcaatttgctggtagaaattccatgctgtcgctgccaattcctgttgtgcttcggctgctgcaataagtggagctgcaataagttcccgcatgggaagccccttgaatttgtcagtcacgtttgaatctgctttaagaaccggagaagtttctctgttttgagtctcttccaatgcagcggagataatttctttcgcctgtccgcttacattttcattcaagttttccgcattttcttgttgcccttggtttaatatttcttctgccataacatttgaattttaaaattgttagatgttttttacaaaatcgtcaataattcgggaaatgctctccggagtctcctgaaccttaaaattgacgcaaacctccatgacatcatccgcatccggttttatgttgctcatctgcatctggagattggctctttgtgggctggataacaataagttgttttctggaatctgtgattccacgcttccgaccttcgccttgaactttatctgcacattatccatcgcaagataatgatgggatatcaaggctataagtggaatatcaatagtcttgtctccaaccatgatttttttcgattggaacgtatttgcgttatttgcatttgttccttcaaaaagtctggtcagattttgtatctgatgattctgcaatgtatcttgtgcacagtttacggcgtattgcaaaccattcataatatcagagaatgaattggtttgaacactgtccggctcatcgtcattatttttcttgtctctgtgaaaaagtcccatgtttttaatttaattacttgatttgttgcctttaatgagcaccaatcttgacaatgtccggcttacagcttccatatttacactggagtctatattattattgacaatgccttgatgccaaaacctatatatggtggattctccgtgtgttccatcacgtcctcctttctttattgggattatacttcggttcatgttcgttgcgggcggaacttttccgcccgacggtttactgcttcctcaaggtaggcaatgctccgttaagttcgtaacgccactctgagcctgcgttctgcaaggcggtgttcatggtagcaacggctttctgccaggtaacgtcagtgccgtccaccttcgtggctccggtgcttttcttattgtagccgataccttgttcatgattgttcttccaatagcaggcggtcacggtggtgtagttatttcccaaaaaaccgccgatatgtacatagccagtgctactacccgtactggttacgttgcccgtggcatagcaggcaaggaggctgcttcctgcgttcattcccaccagaccgccgccagcgatattctttttggggtctatttctaaggtcacgttgcccgtggcatagcaagcggtcagggtggcactcgaattcgtctgacctgccacgccgccgacatcgaccattcccttcactgtggcagaggaactgcatccggtgatggaaccgtctatttgagcacccaccacaccgccgacatacaccgtgccgctgacgctgcccgacaccgagcagttttcaatggtgccccagctatatcctaccacgccgccaatactgccgccatatatttgattgcttgttatctgtacgccctccatcaccacgttcttcaccgtaccagctctattgagccagccgaacagacccgcatattcgtcatttgtcgtaaaggtcagccccgtaatggtatggccgccaccgtcgaaggtgcctttgtatgagttgtcgtagtctgtgcctatcggcgtccagtctttacctgtgaggtcgatgtttttttcgagggtaatgttaatgtcggtcttacctccgttcactaattcggctacattcaacaggccgtcggcgttatagaccgtgtagctgccgttgctctctatggtatagcccaggtcttttgccgcagcgagggagacggtgtaggtatattcaccgcccgcctgccagtcggtagcattcttcatcttataaacgaaggtcttgccgttagtgaaggtgcaggtaacgaaagccgtgccagctgccacactttgcggggctacgatggcggtgtaggtgttgctgcccttgtcatacgggacgattatatccgggttgtcgccttcagtggagagtcccgtcagctgcacggatgccagcccctcggtgtagtccgtcagaacgatggtcactcgcgccgtgcggtgggtgaagcggagcgtggggctaccgtaggtcaccgtctgtccgtcggctacgatgaggtcgctgccctcaaagtctttctgggtactttggttggcttttacctttaccgcaggtggggttgtctcgccagcggtgtagggccaccacgctgtgacggtgatgtcgttgtggttggtccagtagtacgggtcggtggaggtcagcgtggcgctggtgagatcgacggtggagggcgtcacgttgtacgtcttcaccgtgccgtccatcagaactgccacgctctgcacacccgtccaattgccatccgctggggcacgggtgccggcggtggctgtcgcggcggggttcagccccgtggcggtgaagacgatgggtgtgccttccgccccttctggtaggaagcccgcttcgtcctgtgtgcaggcggcgagtgagagggcgagcgctgcaagtgcaaaaaatcttatcctcataatatctgttattttattactctggttctttccgttgcgggcgtaacttttccgcccgcaacggtttacaacttcctcaaggtaggcaatgctccgttaagttcgtaacgccactttgagcctgcggtctgcaaggcggtgttcatggcatcaacggctttctgccaggtaacgtcagtgccgtccaccttcgtggcttcggtgactttgttattgtagccgataccttgttcatgattgttcttccaatagcaggcggtcacggtggtgtagttatctcccaaaaagccgccgatatgtacattgccagtgctactacccgtactggttacgttgcccgtggcatagcaggcaaggacgctgcttcctccgttgaatcccaccagaccgccgccagagagattctttggggagtctatttctaaggttacgttgcctgtggcatagcaagcggtcatggagccccatttttctcctgccacgccgccgacatcgaccgttcccttcactgtggccgaggagctgcatccggtgatggaaccggccttttgagcacccaccacaccgccgacgcacttcgtgccgctgacgctgcccgacaccgagcagttttcaatggtgccccagctaaatcctgccacgccgccagtattgccaaacatgtgattgcttgttatctgtatgccctccatcaccacgttcttcaccgtaccagctctattgagatagccgaacagacccacaaattggtcttttgtcgtaatggtcagccccgtgatggtatggccgccgccgtcgaaggtgccggtgtatgagttgtcgaagcttgtgcctatcggcgtccagtctttgcccgtcaggtcaatgtttttgtcgagggtaatgttaatgtcggtcttacctccgttcactaattcggctacattcatcagaccatcagcggaggtcacggtgtagctgccgttgccctctatggtatatcctgggtcttttgccgcagcgagggagactgtgtaggtatattcaccgcccgcctgccagtcggtagcattcttcatcttataaacgaaggtcttgccgttagtgaaggtgcaggtaatgaaggccgtgccagctgctacactttgcggggctacgagggcggtgtaggtgttgctgcccttgtcatacgggatgatttcggctgggttgccgccttcggtggagagacccgtcagctgcacgcccatcgactcctcggtatagtccgtcagaacgatggtcacccgcgccgtgcggtgggtgaagcggagcgtggggctgccgtaggtcaccgtctgcccgtcggctacgatgaggtcgctgccctcaaagtctttccgggcactttggttggcttttaccttcaccgcaggcggggatgtctcaccagcggtgtagggccaccacgccgtgacggtgatgtctttgtggttggtccagtagtgcgggtcggtggaggtcagcgtggcgttggtgggcgtcacgtcgtatgccttcaccgtgccgtccatcaggactgccacgctctgcacaccctcccaattgccgtccaccggggcacgggtgccggcggtggctgtcgcggcggggttcagccccgtggcggtgaagacgatgggtgtgccttccgccccttcagacaggaagcctgcttcgtcctgcgtgcaggcggcgagggcgaacagcagggcgagggctgcgaatatatggatgtttgttcgtttcatgatgcgtgttgtttaggggtttttattgtttcttttcagtacgggcagaccgccggtgccgagtgtccactggtagtcgttgccggtgagggcggtgttcatgccgtcgacggctgtctgccatttcacggtcgcgccgtctaccttcgtggcaactaccgttcctccttcattacggagtactccttgctcggcattgcctccccaataacaggaagttatattcttgtagttgaaacgcactatagttccacagccagcctcatctttcaatgtgccgttgaaccagcaagcgatgatatcgccataatttgcattggctataccaccactatgtacagtaagttttcccgtcacagagcaggcaatgatttggccatgatttcggtccaccattccagcagctcctccactactgccatccagattcacatctatgagttgtaggttctttatcactccactttgatttaaaaaaagaaaaagtccaaacctcgctgctgaaaagtttaatcccgtaatgctgtgtccctgcccattaaagacgccggagtagcctggccatgtgtctaaacgtgtccattccctacccgtcaggtcgatgtcggcggtgagggtgcaatttatcgattcatctttttgtatggctttgttccatgccagtaggccgttggcgttatagaccgtgtaggtcttggtgttgctgtcgtagatgtagcccaaatcctcagcctcgccgctctcgccgccgccgtcaacccagctgccgatggtgcaaccctctaacgtcaagccggtggcgttcaccttaacggtatatttatagcggctgcccgcttctaatacgacgttgttctgcggacggaagtagaaggtgccgtcgccgagttccaccttgacgaacggtttgcctgccgcaacggtctgcggggcggtcagtgcctcgtaggtgttgccgcttgcgttgtaggtcttgatggcggtcgggttgccgttatcggcggacaggctcatgaggctcaccgtggcaccagcgacgctcgtgaatcccgtgccgggcttcagttcgattgtcacgcgtgccgtgcggtgggtaaattcgagtgtcgggttgttaaattccaccttccggttctcagcagagatgaagtcgctgttctggaagtcagccaatttgctttggtcttcggccaccttcacggcaggcatctgtgtaatgtcggcattgtcgaagggccaccatgccgatacggtaatcgggtcgcggctggtccagtagtacggggcgttctcgcgtgaaagcgtggcactcttgaaatcggtagaagccgtaacggtgtattcctttaccgcatcgcccatcttgagtgccacggaagtgacgccctgccagtcgccgtccacagcggcacgggtggaatgggctgccagcggcgttgcttctacggacagtccggtggcacggatgacgacggggtattcaccttcgggcagacggttatcgccagcaagttcgtcctgcgtgcaggcggcgagggcgaacagcagtgcggtggctgcggggataaataatctatgtctcataattctttattctaatcgattaattattaaaatcctacaggtcagcacccacatctccaccgtctatatcgttccactttgcaatggtggcttcgctgacttcaaggactttgttgcgtaccttgacggtataggtatagttgttgcccgccagcagtgcgccttcgggcatggtgagtgtggcatgatattcctgacctttgtaattcacaaccaacggcagggatgcaactgtctgcgggaagaggatgatcgatgacgtgagattgccgtctgccagattcatggccagttctccggtctgtactccgttgtctgcggtggcaataccgtcggccgtgttgaacgtaccggtgagtaacaatccgtccagcgtgtaacgttcaggcttgaccacgctgaaatccacgccgtcgcccgcctcgaaggtaagggttatctggctcatgcggtggtggaaggagttgtcttcaccgcctttggcggttttgtcggtaaagcttactaccgggttgtttttgtctcccgtggctcctgaagcaaagaggaagtcgatggcaggcttgttttgctgcgccgtggcatcggtcgtggctgcgaggatgcctcccgtcgtgttgtacggatagtaggcgcggaaagtatgggtctttgtatcttcgatatagataacctttccttctgcctcaaatttcccgtttttcaggatgaaaggcacgttgccgtactgggaatcgttgccgatgtcggtgatgccgatacggtcgccgccagtccaggtggttccgctggcgcgggtggcgggggcgatgttggcggtaaactgggcggccacggggtcaccgttcaggttctcgttgtcgttgttgcaggctgccagtgcgagggcgagcgttgcaagtgtaaaaaatctcgtcttcattatattagtcattatattagtttaattccatttcaatatttgctgcacctcagcaaaatcaaagcaagctttgctcctgcgttcggtttactaattatttacaaatcggcatttacatcatcacctttcacttctccccagccgttgatttcggctccgtccacttccatgccttcgggagtctcaaccagcgttccgccgagggtcagcgattcgccctttccggtgttgaaatccttgagggcttccgtaaggtcgcttttcagcgtggtgggggtcgggttgccgtcagcatagcggatttcacccctcagcagttgttccgttccggtcacacccagcagccgcaccgtggctttccacttgccggcatcgtcaccttcggtaatcttggtgaagggcagcacgacgttcgaagcggctccgtaggtatcggtagcgaagtcgagtgttccggctgcacccgtcagatgggcaacaatctccgtgatgcgtccggcggcatcacctgtaggttcgacgacaagcgtcagttcgcgtacctgctgcttcattgcggcggtcagcggatagtccctgtctttctcgatggtcacctgttccgtataggtgaagaaccatcccggggcattgttcacaaaggcatccgtgcctgcccgggttcccgtggatgcggcaatggtggctgtggtgccgttcaccgtgattccttcagccgggttccacaccgcaagtgtgtagctgcccggagcaaacagatggtcgggggtatgggtggcggaagtctccgtacccgtatagtcacccatggtgaccgtccatgtggcaggtatgtcaataccctcaccgcgggccgaccagtcggctgtcaccgcaatcttcccgtagtcgggatgcggcgtgtcataaagcgtgtccttcacgcaggaagagaacagcacggcggctgccattcccatcatatttatatattgtcttgctttcatattctattcctccgtgttagaataacttccataccaatgtcacaccggcattgatgggaccccaccaatcttttgtttcgttgccgcggcgtacacgcacgccgtcgatgacttcatatttttcgaaatcggcattcaggtagcccaaaccgaggttgaaatcaagagccagtgccttgttcagccgcagctgatagccagcggtgatgccgccacccatcaggtcgccctgcttgcctgtttcggagaacttgtagttgaactgtccggccttgaacatcgcgcccagataccaggctttcttctcacccatatagtaacgtacttccggagccacttcccagagtgcatagcggcggtctttgtcgctccagctccaagaagtccacgagccgtttacggcaatgccccacgacgggcagatgcgccattccacgccaagatctggtgtcagggtagcccagcgcagcaggttggcacgcagggagagatgatagtcggttggggtttccaatggcatgtcggtaagtttattttggtgagcggctttctcagcttctgccttttctgcggcaaatcgggcttcttccgctttacgttgctcttcggcaagccgttcctgttcggcacgcttttcggctgccagtcgttcggcttccgccttgcgtcgtgcttccgcttccgcatgcattacggctgtttcctttaccggtaccgtcaggcgcacggtgacaaaatcaccctctgtcgcatggttgcgggtaatgaaattctcctcttttatttccgcgcgtgtaatcagttcggattttactcgattggcacggatcttcgccgttgcaaggttctcggcttcactgccctgcgaattgcagtatccgtcaaccaatagcggcagcttgccgtcaagaattgttgctttgttgttttcgatacattccaacaggcgggcaagttccgtgtcattgccattccaaggcacgtagaacatgtccttctgcggaacgaagcggaaggtgtaggtcgtgtctgctttctgctgcgcaatgacaggaaaagttaccgtcatcagccacagaaacagggtaagaaaagtgatttttctgctcatataaacttgaatttattatctttgtcttctccaaaggtaataaatgctattcagcgcccaaaatattacaaaaactttttctgttgaaatacagcgttttataaaaaatagtcgtttgagcacttttcaaattgtcgttagagcacctttttgtcgaattagcacttttttgtcgcttgagcactttttgaaaatgggcttctgagacctttttcatcggctttttaccacacaaattattccagatttgcttttttccacttgccaggcgtacatccttccttttcggtaaatgatttgataaagttactgcgagaaagaaagccggaagactcagccagcttctgtatattgatttccggatgctccttcagtatgtttttcgcatactccaaccggagaccggttatccattcgcggaatgtcattttatacgtagtcttgatataagcggaaagataggtgcggttggtatgaagcacatctgaaagctcctttatggtaaggccgggccggatataaccgtccgcatcgatccaacctttgatttttttcgccatttcggcatggaaaaaaggagtatcctgcctctgtgcctgttcccggtttgtggtgtcacacaggtcttcctcttcagaagtcatgccatcctccatcgcgttttccacctgttcgtaaaacagcagatagttcagatagcaaaggaagagataaatgtagaacggtaccgatgacagaatccagatatagatgtattcatcaggcaggaatgtcagcagtccgcatcccaccccgaatgtgacagcccagtaggtgaaaatggaaagccatttgatataggcaccgatgtcatccgcacgggtgtcatcgaaaatgcggatgaccctgtgataggcccggagaagcctacgggtcaagaacagcccatagataaccaaccatgcggccaaggcaaacatcaccgttgtctgtaaaccaccttttggtaacaacagcagaacgatgccggaaaggatggaaaacagtatccatagacagatatgcgtccgtaaccgacatttggtgatataaaagcggtcaagcagagtggtgagggccgaactgaacaaccagtagcacaaaaaataggtggacaggttcatcaggatggcggcatcggtattcttgaacctgattccaaaaaagaaatgtaccgaatagttggcggcaagtaacagtatggctacccccataattcgccgggaacgcagataattattgaaaatggctttttccggggttggagccaacaaaaaataaaagccgaagaacgacatcaacggcagcgcaatgcaaagtgaataactgtatatagatggttccattgtgtaatatgcttatttattttgcagggcaaagttacaaaactatcagcgaaccgaagtattctcacagcttctttttatgtctaaataacactgaaatacttttatattagattgatatcgggtttactttcatcgttgccaggttcaaatacaccccatgatgctctatcatcccgttgcggaacatcttccacaggatattgcacccgagttgcgccagcgtggagttaatgaacaagtcctgcttctccaatgcttctgccagcgagcagctcggaccggaatcctcctccttcactctcgcgtatttcacgaaacgggtgatgaccttcagcgagccgaccgcttcatacagcgtggaagccggttgcctgatttttttcagcacggtccccattataacctgtccggtcgtttgcgtgttgccgaagtccatccagtagagtggcgtggcattgtccgtgtaggaggccggcggcatctttcccagcacgttccacaggtcgagccgggacttgatgttgtccgtgcaggtgacggtgatgttcgcgatttcatcccgtttcacctccttcaacaccgacggatagggtctgggctccgctttccagtcgttgccgaagaaattattgacacgggtaatgaggcatttcgccttgttcaggcctatgtcggaatcactgaagagttggcgtccgatgttggtcccggacacgatgtcagggtcatagagcgtgacggacaggccggggtgtccgagcgcccgcaatgtcacgtcgagccgggccagacatgtcagcacctgcgaaccggttccgcccgcgccgataagattcactgttaccgggtgctgcgggtcaatcaggtagttgtcgatataatgcactcttttcatttcagtatgtcctttagtttcaagttgttcaacggtctcagttcttcaaggtcgaaaggtctgtcctttgccgctttcgtgaccagaacgagatttgatttggtcgggttgccatgcgctcccagatgggagaactccgtcagccagaacttcctctcccaatattcgagcagtttcgcgtaggtcaggtctttcggcttctctattctggcggaacccagacagacgcttgcctgcgtcacgttgaagaacggggcggcataaagttccgtcttttccgtcggttccctgtctttgcaggcatagacattcaggtggctttctccggcctcgtagatgattcccggcagatgatactccgcgttctctatcttgagggcttccttgaagaacatcatacgtttccggggagagttgtaccagatgtatttctcgcttcccttacgcgggtcgcaccacaacaggttggacggtatccttccatacggtgtggcgctgtgcctttcggaatagccccgtaccagctcgttcatgaactccaccgtcaccggacggccttcgcccattataccgctttcatctatatccctgacctcgatgaaataactgttgtcatatacataatgactgttgtcttcccgggcataggcaatcagcgctgcccgcggatggagcagcgtcctgagttttcttgtcaattcgttcgtttccagcatgttttaacagattatattgatgaacttatccgcccatttgaagaaccgctccggatagtcatccatccggaacagttctccggtatcggacgagaggtcgcaggtcgttaccggcgtgatgtcataggtctccctgctgtttgaattgtaatagtcaacgagatattcagacactatatcgttgatgtcatagacgacccttatctgctgttgcaggtacatcggatggaaatccggattctcggagtagtaggcgtcatacccgtaccccatgatgccccgttccggtgtcaggaagggcagaccgctcctcatggcgtcgaccagctgcctttcaaacccgttttggggagtgtacgagccgattgcccccggcaggtccttgtaataggactttgcagccacccgcctgagcagcctgcctattttcccctcctgataggaacgcacaagtttcacccggcttttccattcctgcgggtcatcgcctccgtcctccgagagcagctcgaatatgaactccgcgtcatcgtcatccagaatggtgctgataccgttggccgtcatcagcttgtggataaaggtaatggcgatcctccttaaaacgggactgagtgattccaggaacctcacagggaaatagtacagcgtcagacttccccaccggtggtacttccacaaacggaagaagagcctgcctctttcctgctcgatattgacattcagctcatcccccacaagcgcgtccatctcgtcgtacagcctggctatgccctccccgatactgtttcccggtgtgtgcgccgcttccttttgcagcaacagggcatacttgaaaaaggaatcacgcaggaactcatagttttcccgcgtgattacattgatgctgccgcattgaagtccgtcgtatgtctccacgacaaggcttttcagggcaaccggtgcaagcgccgtgctcagaaaagaattacggccccgcttggagccgcaatccgttctttcctgtccaccccgtatcgggtttccctccgtgtctgcccgatgatgagccttgccagctgttcctgccggtgttcgtccaatggtacacatggtttcttgtttttctttttcctgttcttcctcatatatcctatcctttggttccgacagtggtcttgaactcgtacacggccttgtcatccttgagtaccggaccgtgtaccgtcgcggttgtcagttcaggataaaagttggagtaataattcatgaccatttccgggctgtccgacgggttcggatcgtcgagcgtgaccattccgctgcctttcttgaacgtgaatgaacgtgtcattcctgtgatttcgagtgccatagtcttaaactgtttgatagggtgaatacttgggttctaacatggattggggaaaatcgggatattcctcgtaatccttgggattgtaattgatttcttcgtctgcggggtattgcatccggtagtcttcaggcgtgaattccggttcctgccagtgcgtgacttcctgaccgccatagttttgcggttgtacggaaggctgctgtgcgtattgcggttgtggtggggtctggtgttgaaccggtctgtgcggcggttgctgaggtggccacatcgaaggctgttgcggttgtccggccatggatcccggtacctgaggctgtggcggatagggcggttgctgtacggaaactgccataggttgtggctgcggttgctgtcgctgttgtgccgttgccgccataggttgcggtcgtggctgcgactgggcttgcggcaccggttcatccatcagttcgaacaggctgcccttgttcatcgcctttttctgctgctccatcatttcgtcaatcttcttctggtcctgtggcttggcatggaggcgtgcctgagagagtgcggtgacggcatccttatggttcttggccgcgatcagctcctccgctttcttgaggtgtttctcgtatttctcccgcctctccttctcctctttcgtctccttggcctttgcatccttcgccgccttactttcggatgcggccttctccgcctgcacctcgaattgagccatgttggtgattagtcccaccgctttctgtatcgggcgtgcgacggtttgcaggaatcccgcgtccagttcctcgggcttcccgttgaccgtcaagggtacgatgtggttctgagcctcgtccttcagcccgttcgacttcggcagcgtggatactgccagttgtccgtttgctttacggatgaccagcgtaaggtccacgccttcggtcatcatctggttgattgctgtaaaaaacataattgtatgaattaaagtgtgaataaccgtattctttctatctgttgaagaactccgccagcagcctgttccggtcgggatggctgcatatctccagtaccgggtccagcagcgtggagatgtgtacgggtccgcttctttcccgtggggggaatttgacggtcggttccgggacaggatacttccttcttgccggtatcggcactggtatctgtaccggtgccatcggcggtcttgagatgattgcttgattcatgactctataattttaattgtgaatacctgggctttggcagcccgttgaactacaagggctttacggcaaacgcttccggaaaggcaaggctttcgggaaaaataccgcaagccctccgggcgaggatgatttttccccgaaacccggagggcccggccttgccgtccgaaaagaggcgtttgccaactttgcccggtagttctccggtctgtcaatggctgtatatgcctccctttcctttccgaacgtgttttcattatccctgtttccataaggcatggaacacaaaaagagccgtccgtgaggacagccctgtcctgcaaggtattgcagcggtttatatgccgtatttgttccatcttcctatattttatgccggtggaatcagaataccaggtagctgaggatacaaaaaagtatcgccgctgccaccaggaagcaggctaccttatagagaaacctgaagaatcccctgaaacagacgatggcgactgccgtccacacgggcgacacgcctcttgaatacagataaccgaacacgatgaaggccgcgatggccaatactgtcatccttgtccatttgcctgttgtcagttttccgatatattccctcgttttcatgaccgtatattgttaatgggtgaaacatgtcatttccaatttcgggggccggagagcggaccgcctccacaggcaaggttttcggggaaaataccggagcggggcgaggatgattttccccgaaacctgcaaggcccgaccttgcaggtggaaacgggcggttccgctacctttgcccgcagaattggaatggcgggatcatttgccttttgcacctttgggcttgggaaaagaaagtttcaggttaaaactgtcgtcaaaggtgagtgccgcatcgaaagaacatcctttcttacccttgaaacccttgataagccgggtggagccggatgagaaaagctgttcaagatgccggtcggtcagttccttgttcaggaaacggcggaacaccagcagcccgcatccttcacggtcgcatttcgcgaccttggacttcaccaccacgttgccggccttgcacttggggcaggtaaaggcgtgtgatgacggttccgggaatttgaggcgcaatatctcgccggttacttttccggtgtattccctgatggagagcatgaagctgtccggatcgagggtacgtccctctatccgtgccagtgccctttcccatgtgccggtcagctctgcgtcggccaccatcatgtccttcaccgattcgtagaggtacagccccttttccgtcggcaggatactcttgccggaacgctcgacatagttacgtttgaacagggtcgtgatgatggcggcacgggtggcgggtgtgccgatacccgaatccttgacagtctcacgtgcctctccgtccgtgatatcctttccgcagttctccatggcggcaagcagcgtggcttccgtgtaaagcggcctgggcagggtcttcttctgcgacagtccgcgacccgagagcggaaccagcccgccttcggcaaacaaggccgttcctccgccatcttccggctcgtccttttcccggtcctccttccgggcgaataccgcccgccagcccgtgttgacgatgaaggcggagcgggagcggaaatccatgcccccgcacatacactccatgagcagccgctccttctcgcagggcggggagaaggcttccagcatcctgccggctatcagggtgtagacggcggattccgcctcggacaactcttcgggagcgacacccgtgatgatcagggcatggtggtcggtcactttcgtggtatccacgctccgggtgttcagagcggaaaaatcgaaagagcgtccgtactccctgaacagaggcatggcaatgattttttccagcaaggcgggtatattcgccatgatatcttcgggtatgtaccggctgcccgttctcgggtacgagaccagtttcttctcgtacagggactgggcgatggaaagagtcttgtccgccgtaaggtcgtggtggatgttgcagtccttctgaagggaggtcaggtcatacagaagtggggcctgctggaaaaccgtaccacgctccactttggtgattgtcaccgccgagccgggaatgatgcgtccgtatgccgtttccgccgctttcttgtccccgaagtgctccggatggatgaacagccggtgcgcctctccctgcttcagcgtgatatgaagctgccagtatggtgtggagacgaagttgcggttctccttgaagcgcgcgcatatcatggcgagggtcggggtctgtacccgtccgatggagttgttcgccgaaccggagactgccgccaacgcgcggctggcgttcatgcccaccagccagtccgccttcgccctgctgtccgcggccgcatagaggctgtcgtattcatatccttccctgaggtctgccatcccctttcggatggcctcatcggtaagcgaggagaaccacaggcgtttgaaaagcttggtacagcccaggtgggaatatatccaccggaagatgagttccccctcacgcccggcatcggtcgccacgatgatgctgtcacattcggagaacaccccgtcgatgaccttgagctgcctgccggcggcgatgtccgtcaccatgcccctgtccgtacgtatctgtcgttccacaagacggaacggttcgggaagcatcggaaggtcttcggcggtggttctcgtgtagccgtatgttcccggcaatgccagtgatactaaatgtcccagcgcccatgtcaccatgtagccgtttcctgttatgtagccgtcctttttctctgtagccccgaccacacgggctatctcctgaccgacactcggtttttctgctatgattgctatcatgattcggataagaattaagccgtttcccgcttgccggcgtacggagggacgggaaacggcggttatacattcggtttacataattataaaggtggagttactctcccacggacttgatgccgaggatttcgagcagcgggtcaccgtccttgcgtaccagctggagtgtggcgtccatcaccacgtccacaccgaggagcacgaggctgagcggcatcacttttgttttctctcccctgagcagcgtgtcaagttctcccgacatctccagctcgtccttcaggatgccgatgcctgccaactcgtcccagttcacgtcctccgccttgaaaggcgtgttgttttccttgttcatttccatgttctgattctttaggatttcacattcgttttacttttactttgaccgtcaggctatgctcgcgcccctggattggcggttttcctctccctgtctttgtgcggcggacaccacgttgcgctgcgcggcgtcgcgtctgcggtcggggttctcgttgtagaagtccagccgtccctggttgaagttcgccttgacgtactgcgagatggtcttgccgtcataccccttgatgccctcgaccagtaccgccttgccgctttggaggtcggcacgctgcttgcgggtaagctccacgtcccataccttggccggtatcttgaactcctcgcgctggtcgaaaccgtccggtgtgcgcgaatagctcagacggcccgtttcgaggtccgccttgatgaatgaggagaattcctcgcccctgcggttcaccatgccgttgaggaagatgggccgcccttcacgcagctctttctgctcctcgggagtgaccttcacgccgcctatttcattcgggatgtagatttcccgtgcgccttcaggggagtcgggattgtagcgggtgtaggacgggcggcctgtcgcttcgtcgagcttcacgtaggaggagaacagttccccgtccttgcgtttcatgccctccacgaaaatggccttacccccgttcaaatcatcgatctgtttcttggtcagttccacgcctcccagatactgccggttgaagagcttgtcgttctcgaagatgaactccacgcccctgcgctcggcattgacctggatgtgggcatcgaacggattgcccgatctggccgtcattccttcgatgaatattttctttccttcacgcaggtcgttctgttcctgttcggtcagtttcaccccgctgatttcacgtggtatgaagacattctcggctttcatcgccaccacctcgttggtcagcttgtcgatgctgacgaaagaggggacatactcgccgttgcggtttttcagttccacgacacgccccatgttgcccgtctcaagcaggttcttcttgtcctcgtcagagaagatatgtccgaagtagggacggtcgaggtcgggtttctgccggataccgtggatgcccagtacgatgtccccagcccgggactgctggaacgagagcctcgcgtcggtacgtaatacggcggagccgaagttcatgctgatgggcactacctggttggtcttgtagcctctgagcatctggtcgagcagcccccgttcctgaagttcctcacgggagagcccgaagttctttagctgttcccagttgatcatggactcgttgtagcggtactggggctgttgctgcgtacctccgccttggtcggcctgctgctgtgtttcattttcttttgccatttcttcttgattttgatggttgatactttggttttccttgtcgcgggggacaatctcgtactgtttgaggaattcttccaccgcgtctgtcttttttccggcggcgaggtcttcgatggcctgcctcactttcgggtcgtccagtgctttctccttgacggagaggatgccgaagcgtgtcgggtccttgagctggctccagaaattcttcaggaaattctcgaacatactggcgtagcggtcgattttcagaaaggagtttgtatgctccttgtctgccggaaccgtcttgtacctgccgtccttgtcaatttgggacactgcctgtaaaatcagttccatcttgtcgaggataaggatgatgtcgctcatctgttcgttctcggcgacttgcggtttagggggatcgtcccttccatttttctttgccataactttgtttttttagggttgataactatgattgtcagtgcaaatatataggatgatttctgatatatgattgatttacaatacgttgtactatatgtttcatcgtttgtcatcctgtttcaccgcgggaggaaaagcgggaggcggaaaaacgggaaagtcagaggaaaaagcaaggaaaagcaccggattaaaaaggcggaaaagggcgggcacacacgaatggcaagccccagggcaagaaaaaacggcaggaacgccacgaaaccgacaaggagaaaaccgtattatgcagagttgcgagcgagctgtctttagtccccgcttccttgtgccgctctataagacaggaagaagattttatatgggagatgtgttgacggcgtaatccattgggacatcaagcacggcaaaataccgccgtcagattgttttttatcttgtcctatgcgtcgtaggtcgcttcgcttgctaagtcccggccgtctccacaactcggacggcgataccggaacgttttttcgggtgaaaaattaccgcagggaattttttgcccgaaaaccggaggcctgaacgtggaaggtatcgtcctccgggttaccttcttgaagggacttgacaagcgaagcgtgcttatgatggattttcatggaggaatatggaaaaatgcacatttagtctaagaaaattgcaatcattttgcgtaagtaatcagaaaatgattactcttgcagaacgataatacataaaaaatgttttttgttcgctcatttatggttgttcatttttaatgaatgcgggcaaataatgaacaaggattcgcttacacccgccctctattggagaaaattggtatttttcccatttttctccaatagaatggctgcaatattgataattttcactacttttgcaacatgattataccaagggataaatatttacaggagctgaaaagtgtgatgcacaacgggatgattaagatcattaccggtgtacgccgttgtggaaaatcgtatcttctatttgaattgttcaaacaatcattacttgaaaacggtgtgaatgaagagcacattattcaggttgatttggaagaccgacgtagtaaacacctcagagagccggacatattattggattacatcgatgggcatatcacagataacgatatgtattacatcctattggatgaaatacaacttgttcctgagtttgaagatgtactcaacagctatctgaaaattaaaaatgcggacgtatacgtgacaggaagcaatagccggatgttgtccagtgatgtaaaaactgaatttcgtggccgagggtatgaaatcagagtccatccgctgagtttttcggaatttctcaaggcaggacagtacacaaatgaactttctgccctacaggattatatgatttatggaggaatgccacaggtcgtatctttttcaaataaaaaagaaaaagaaaattatctcaaatccttgttccaaggaacttatatacgcgatataaaagagcgttacaacattaggaacgatgatgatttgagtgagcttatagatattatcgcttccaatataggctgcctgaccaatccgacaaaccttgaaaatacattcaagtccgtaaaaggccatagtatttcagatacaaccatacagagttatcttggaatgttacaggatgcttttatgttggaaaaagccattcgatatgacattaaaggaaagcattacatcaacacgccttcaaaatactattttgaagatgtaggactacgtaatgcccgtctgaactaccgtcagattgatggtggacatctgatggaaaatatcatatataacgagctgcgcatcagagggtattcagttgatatagggcaagttgaggtaagaataacaaatgatgatggaaggaaaatgcgaaaactgctggaagtggatttcatttgcaacagtggggacaaacgtgtgtacatacagtctgcacttgatatgcccactcaagaaaaaatcgaccaggaaaccaattcccttcgtcatatcaaagatggatttcctaaaatagtcattgtgggaggtttgaccccttctcatgtgaatgcggatggcatatcaatcattaatgtaatagatttccttaaagatactgaaggaaatctattataaatctaacataatatatggtataataatgcgtgaaaatggtgcaaaagtaatcggatgttgattacctctgcacttttttcgcgcaatcacggattaacttgtggagtggaattttttacgtatgtatgctccatccgtggaacggacctccaatcatcacggcaaaggactcatccggtctgccgtggtagagcaatccacctacgataccgttccgcccgtccggcgtcctttccgcgaatccgaatgaatacggcgcaaaatcccaatagaactcaatctcatacctgccgttggagtttttctcccattgcttgaggcgtccgatgcaattctgaaaggtcgtgtcgccaatgctcttggcatattctgccaccttgtcgtagtgttcctgacatctgattttcatatccgatcattttaagttgtttgcaacagttcttcgtatatcccgaaaccgaggcatccggcaacggtaaaatcctccccgcctttgtccgccaacgatttcaaatcgtccaaactgtcgcagtaaaagaatatttcgtcatccttctccgtatcggaatccatggccaaagcaatccttgcctcttccgtttccagcgtgtcacgccatcggatgacgcaatccgcgtaatgaggatcgcgcccttgcccgctgtagaatttcaaataatggcatcctatttcctgcctgacctcatccgtttttttccatgagctgtcatccacgatttcaaaccccattccttcaaccagcaggcacgtgccgttgtcatatgccatcatggtacgtttgccgatatgtttttcgcgtaaatccgcccaatccggcaagtcccaacgttcgacagtccaaatcccgcgatagtcttccgggatggcgttgtattcgctcaacgttatctttctcatattattattctttgggtattacaaaagtgaccttgtaggtcttacatgctttcccgaaagcgggattggtgtcaaattccttgtatgactcccaatccaccgacatggtgtagccgttcggaaagttttcagcgatgaacttggttatcattttcttgtcctcatcagacaggaacagttcctcccgggtgccgtactccaatgcaaaaatcgcccattcgggaatgttgtcccaaacgagcgtcttgctgttattgccattcataatcctgctgtttattgctgtgataccataagctctttgataatgttgtcgagctctgtttcccacttgtccgttccgtcaatcagcgagggataggtaagctgtttccactgccggtaatcgaagagtttcatacgcagcggatagtagtcgaaaagtttccggccttcggaaaatactctcaggtggtttgtcccgacttccatcagcctcagaccataacgtccaatgatttcgtggaaccttttcatcggggtgaagttgcttctgctcatacctttttatttttgagttaaacatttcacggctcgtgagccggtattttatttcttgcctgcctcgctgtcccgtgccggattgtgcaaggctttccggaaaaataccgcaagcggagcgcggaagatttttgcggaaacccataagggctcggccttgctcaatcctgacaggcacggggcgacctttgcaggctgaaataaaacagcggtatcctattcctccttcctgtcgctgtcttctttgggtatcaggtgctgtaaatcaggatcggtcttgatgcgttgcatttcatcttcaattatttgcagcacgtccgccttgatacgtgaatagttacgctctatctgctgctgcatgatgtcgttgccgtccgcatccttgaactcgttgatgacgggtatcttcttgtaggctttcgtttccgccgctactttctcgttgtcaactatgatacgggcatggaaaatcttctggtctatctcttccccgaagttgtccgccacactgcccacgaatgtgccctgcgagaggttggctatcttggatgccggtatcagcgagtccagctgcgtgttgatggaggtggatgtgtcctgcctgttgatggagatggactgccgttgctggagaatcttgccgaaacgttccgaaaggcttttggccgtttccccgaccacctgcccggagaagatattcccgactgtattttggatcactttcgcctctttttcaccgtagtcacgggtcagctgggagaagtcctggaaaccgagacagacagccaccttgttgcttcgggcggtggctatcaggttgtcgataccacggaaatagatggtcggaagctcgtctatgatgatggaactcttgagttgccctttcttgtttaccagctttacaatgcggctgttgtacagtcccaatgccgccgaatagatgttctgtctgtccggattatttcccacgcaaaggattttcgggtgttcgggattgttcaggtccaatgtaaaatcatcgccggtcattacccagtatagctgcggtgaaatcatccttgaaagcgggatttttgcgcttgctatctggccctgtaactggtcctgtgcgcctccttgccaggcatccataaagggagagaggtagttttcgagggacgggtatgaggtcaggattgtaaatatatctgcgtacggtttattcagaaactctattgcgtgagggaaggtacagtatttgccatccttgtaaatccgcaaataccagataatggctgcgagcaggataatcggagattccacaaagaagtcaccctgtttctgaatccaggtcttgttcagattcaggagtatggtgtaggccgattcgtaagcgtcggatatgtccgccatgaatttcgggttgatgggattgcagcggtggctgcgtctcgggtcatcaaaatttatcacgtagaattccggtctgaccctgtacttgtcaatgtttttaagcagttcgttataggcaatgaccgagaggtcatcaaatttgtaatcgtacaaatataaagcgaatcccttggaaatcatctgtttgatgtagttgttcaccaccgcgtaggacttcccgctgccaggcgttccaagcacgatggacgcacgaaaaacgtttacaacgttgatccatccgtcccattccttgccctgatacacgaacttggtcggcaaatttacagaatactcgttttccatcaagtgtgtctcctgcatgaaactctcgttggcggtattgaacacgtcctccatcaggttgtgtttcagcatacggcttatccatacgcccgacatcaaaagaaggatgtacccggcggtcagcgttaccgtgtaaatggcggcgtcaactgtcggactgaacggcaggtcgaacatccaccagttcatgaagaacaatacaagccccgaaaggaaggcggtatatattttccgccaggtcatcttctggtttttcacgcccttcgtgcccaaacatgacagcgcaaggaatatgacggcgaacacttttgtcaccagcaggttgctgaaaagccccgccgtcctctggaaattcagtagtatcttatcgaccactccgatattgatacccgcatccacgaatgcccggtaacagaaccaatagacgtggatgacaacaaacacgatggatatggcacgcatgaattccatgacctttgccagtcctctcaaatcatcttcctgttgcataacgatataattttaatggtgaatgaatattgtttttaggagatgccccgtgagcggcgtttctttttcttcttgtgatacagcctgcgtgcaagagcctcttcctgcgggtcgggaccgtttgcttcaaagtcgaagatcccgaaagcctgttctatggcactttccatgtcggaggagaatccgctttgcagaccggtgtccggcatgggcgcatccagattcgggatattgcccggattattaaagaggcgctcaaaggcatttgccgagaactcctttccgagccgcgagccgttatagacctccctgttcctgtggtcgatgaaggtcgcgccgtaaatgcgtccttccccgttctcccggaacaccacgtctattccccggccgttcaagaggcggatgaaatcctcccggttgccacggcatccatgcatggcgagtgcaatctcgttccgtattttgggctgccgttttttgttcttgtattcacgggtattgtaaccaatacgcttttccagtccttcataaccgaagcgttttccgataagggaggacttgatgggcgtacataccggtttgcctgtattgtctgtcatggtatagacaatgccgttgtaaggtgtcccttcaaattcgcccctaacctgtttcgcctcgatgttaaagcaggacagcaacgcgctgtactctccgaatgactggaaacggtaagtggagaacacgcttttaaggatgttggaaacctgttgctttacatcgccattctgatagtccgctttcttcagatatggttccagcagttccctgcgtttgtcctccacctgtttcagaccgaattttctttccagttcccgacaggccttcatcgagcggttccattcgtaggcatcgtcaatcttttcccctttctcgttcacgcaggtggaaacgatatggatatgcctgcggccgatgtcctcgtgaatatatacaatgtaaggctggtcgccgtagcccatgcgttgcatatactcccttgccaaatccgcaaattgggaatcggtgagacggtcatccaccgaaggattgagcgatatgtgtagcaccggcttctccgtgttcctgttggcaagcaggtaattttcgaatgcccagagcgtgttcctcatgacctgttccggattgcccgtgacatcggcaatcatgcggtttcccgaaatgatgcgtgccgttgactcgttcactttctgctggttgtagatgacagccccgtagagcgatgcgcccctgttgatttttgccaccatgtcattcctcctccctctgttttttgataaggtaggtttcttcaaactcacgggttagcatgatgatccgcttgctcagcaccaccagatctatggtcaccttttccagattgcgaagcagggcgtatgcccgtttctccccgaaattggtcttgattgcctttaccgcctggttgtagttgttgcctacggcctggaactgatggtagaaattggtaagacggacgtagtagtccattgctgccttgtcgattctgaccaccttgatttccttgttcagaagtaccgatttaataaacctcgcacggtaagccatacccgatttctggaatgagagttcaaattgcgcgttctcccgtgaattgaatttgataccgtagcggtacacggcagggtcggattttgatttccgccctacaccttttcttgcttttctgttcttgttttcttccatacgcattgagttttttcagtttctgatcttccgtcatggatttccgactttggaggaaatccctcccgagccgtcaggcgagcggcaagttgttttgggttgcccgaaatatttcgggctgccgaaaacacaacttgctattaccgcttggtaatgaattttccttcgtcaaattgtgttttgaccttcagcctcattcttcggcttcggaaagccctcgcagccgtatccgttccgttgtcggtgcaaagttatggcagtttattctgttgtaaaatagcaagttatatgtaacatgatgacatatggtgacacaggtcgtcacctcccttgaaacatggtggaagtatgggaaaataccattttatttgcagcgtgaacggtaaaacaaaccaatagtcaagtaactgtccgttgtattgccggttagcgaaagcacttgttgtaacaggcgggtaatgattggatgcttgctttgttaaggcagagaactatcggttggtcggtttgccggttggtgagcacaaagcaaccgtatcactaacaaaccatgtcacaaagcaaacaacagacaagtaaaacaatagtataataaaccattaaaaaagttcagttatgaagaagaatccgttattcgttgcggtcagcaatcaaaagggtggggtcggcaaaagtaccatgttgataacgcttgccagtctcctgaattattcgatgggcaagaatgtggccatcgttgattgtgactccacccagcgtagcctgttcaatctgagggaacgggacatggagatggtggagataaacaagaagtacatggtgttgctggaggaacagagactcaggggatgtaggatttatcctatcaggcaggcaaaaccggagaatgcacgccaggtggccggagagttggcggcaaaagcagattttgatatcgttttcatagatctgccgggatctatggacatatccggcgttttgcagaccattttcaatgtggattatgtattgacccccattgccgctgacaattttgtcatggacagcagttttgtctttgccaaaagcgtcatgaagtgtgcggaaaaccggaataacattcccttaaaagacgtgttcctgttctggaccaaggtcaagaaaagaagcaacaccgaggtgcttgacaactatatggcactgatgaagaaacaggggttgaaaattctggattcaatgattcccgatctctgccgctatgacaaggaactgtcatcccggacacgcacctatttccgctgttcgctccttccaccgccggcaggacagcttaaaggcagcggattgcaggaactggcaaacgaactgattgtaaaatttaacctgtaattgagatatggcaaagaaaattgtaaaagtgaatgaagaaaaaatcagggggtatatggtcggtgacattcctgatgccatcgagaacgaggatatcatagtggttgaggttccggaagagggaaacaatgaaaggcaggatacggaaaaagaaactgcccggaaaaattccaaatcttgcaatatgcctaaaagtgacagtaactttcgtcaaaagtatctggtgaatacccccatgcccggacgtatccaggtgtacctgaaccgcaagctgtacgacgagataaagaattatctcaatgtgatagctcccgaagtaagtattgcgagctatatcagtaacatcatagccgagcatatagaactcaacatcgaggaaatcacccgaatgtataaagaccgtttttcaccccctaaaattcaatagtcatggaaacaacattaatttatttttcagtaaaagccgtgtcggcaacttatatattatataaggtatggatgtttatattcagtccgaaagtttataaattctggaacaatcagcttcgttatatgcgcattgcacgtatccggttatggaaatcacgcaaaaaacggatggcggaaaaagcaaggaaagcccggtatagggcaagactggacaaggctgaagcatggatcgcacaagcggagaacgatatccttaaagtcgggcatgaaaagaataccgaaacgcagccgaatcccctgaacgagtacaatgaagtaatcggcaagacgaagatagtctatcttgaagacccggaagtggcgagaaaaactcccacacgttctgagcctatgaaaaaggaacccatagaggaggatgaggatataaatccggatgacgtgattgatgactttactcccaaaaaaggactgacagaatcggaaaaacgggaacttatgtcaaatgacgggtgcgttcctgacccggatttttcaagggcattgacttttgaggaactggacaatgtcgctgatgtgcttatttcggggacggatgacagaaagaaaatccgaaatgctgccgaaaccttgtaccaacttcaggatacagacctgttcaggttcttttcaaccgaattgagtactcaaagccaattggaaaaactgcttagggaaaatatgccaaatggaaaagagacatcaaaacagtctttggaacagattggaattgattggaataaatacatgtaaatatggaatcgaatgagaaaaacaaaaaaacaacaagcaatgccgaagtcagaagcagaatcttttggcataaaaagaaatcctgcaattcgtgccccacgcatctatctatctgaagaagaagtcatcagaattatgcggaaagaagccgctatcaaaaagaagataggaaatcttattgatagtatgctttgtgatgattcacaaatttcagcaatggataatataaaaaataagacagaggcattcgatatagatgaattcgtttaattgtttctttttgctgtcatagtttcagaaggcatgtcgatgtgatatcggtgtgctttctctatgtcagattccttttccggttctgaggtgtagacaatgtataaaacgtgaaaaatgaacagaagccaagtgtgaaagccggctttcacacttcgcttttccattccaatacagacagccgctatttcatcctttcataaagattgagaccggtttgccgctttcaaacgccttgctcaccgtgtagtatgttccccctttcggctaaagattcccaataggctatgactgtatccgctttacgcaccatgtattcattcctgcgaaagtagccgcggaaacggggctgcctttgccggaaggaatgaaattccactttcttcttatccctgtttttctgtttaacattgatggaaaagccctttttgaacagctcaaaatctttttccgatgtaacgtgatgtcatacggtgtcacatatcgtatagtctgtaaatcaataaattaagcattatatattcgcagtcgaaatcattttttgtttcaccaattaaaagtttcgacacatgaaaaaaagattctttttggcagccatgacgctgctggtttcaatgggggcatccgcccagggcaacggtatcggtggaattacggaagctaccaatatggtcacttcgtatttcgatcccggcaccaagctgatttacgccatcggtgccgttatcggccttatcggaggcgtgaaagtctattccaagttctcgtcaggtgacccggacacctcaaagactgccgccagctggttcggtgcgtgtatcttcctgattgtcgctgccaccatcttacgctcattcttcctgtaatatggcggaattcaatgtcaacaaggggattgggcgcagcccggagttcaagggactcaagagccagtacctgttcatctttgcgggaggattgctcgcgttgttcgtaatcttcgtcgtcatgtacatggcaggtatcgaccagtgggtctgcatcggtttcggggtcgtttccgcatcggtgctggtctggggcactttcaggatgaattcgaaatacggtgaatggggccttatgaaactccatgcgctgcgcagccatccccgctacatcatcagccggagaaagttcctccggttgttttctccaaccattaaaaacagaaaagcatgaaaaacgtaatgaaaacagccacgctggaaagcaagtttccgctgttggccgtggagaacggctgcatcatcagcaaggatgcggacatcaccgtggcataccgggtggaactgccggaactgttcacgctgacacgtgccgagtacgagtccatgcactccacctgggcaaaagcggtaaaggtcttgccgaactacagcatcgtacacaagcaggacttcttcatcgaagagggatataagccggatatctgcaaggaagacctgagctttctgagccgcagtttcgaacgccatttcaacgagcggccgtatttgcagcatacctgttacctgttccttacgaaaaccacgaaggaacacagccggacaaccagcagtttcaatgcacttacaaggggattcattatccccaaggaaatgcaggacaaggaaaccgtcacccggttcatggagtgctgcggacaattcgaacgcatcgtaaacgacagcggcctgctacgtatcatccgcctgacggatgaggagatcatcgggagcaacaattccgccggcatcatcgagaagtatttttccatgtcgcaggaagatgctacctgcttgcaggatctgtcactcggtgccggagaaatgaaggtgggcgacaactacctgtgccttcatacgctttccgatccggaagacctgccgtcgaacgtgtcaaccgattgccggtatgaaaggctctcgacagaccggagcgactgccggctgtcctttgccgcaccgataggcatcctgcttacctgcaaccatgtggtgaaccagtatctcttcattgatgattcggctgaaattctcaggaaattcgagcagaccgcacggaacatgcactcgctttcccgttacagccgttccaaccagatcaaccgcgaatggattgaggagtacctgaacgaggcacacagcaaagggctggtttccatccgtgcgcactgcaatgtcatggcatggagcgatgaccgggaaaagttgaagcgcatcaagaacgatgtgggcagccagctggcgttgatggaagccaaaccgcgccacaacacggtggatgtgccgaccctcttctgggcggcaatacccggcaatgccggagatttcccgtccgaggagagtttccacacctttatcgagcaggccctgtgcctgttcatcggggaaacctcctacaaggactcgctctccccgtttggcatccgtatggtggaccgcctgaccggaaaacccgtccatctggatatttccgacctgccgatgaagaacggcacaatcacgaaccggaacaaattcatcctcggaccttcgggcagcgggaaatcttttttcaccaaccacatggtacgccagtattacgagcagggtgcgcatgtgctgttggtggataccggaaactcctatcagggactgtgcagccttatccatgccaggacacacggcgaggacgggatttattttacttatgaagaaaaagatccgatagctttcaatcctttttacgtggaagacgggattttcgatatcgagaagaaagaatccgtcaagacgcttatccttaccctgtggaagcgtgacgacgagccgccgacacgtgccgaggaggtggcgctatccaatgcggtcaatctctttctggagaaaatccgcagggacagcagcataaaaccctccttcaataccttctatgagtttatccgtgacgagtatcaggatatcctaaaagagaagcgaacccgtgagaaggattttgacgtatggggattcctcaatgtattggagccttactacaaaggtggcgagtatgactacctgcttaactctgacaaacagcttgatttacagagtaaacgcttcatagtttttgaattggacaatatcaaggacaataaagtactcttcccgatagtcaccattatcatcatggaaaccttcatcaacaaaatgagaaagttgaaaggaatccgcaagatgatattattggaagaagcctggaaagccattagcaaggagggtatggcggaatatcttcggtacctcttcaagaccgtcagaaagtttttcggtgaggccgtggtcgtgacccaggaagtggaggacatcatttcttccccgattgtcaagggtaccatcattaataatagtgactgtaagattctccttgaccagcgcaagtatatgaacaagttcgatgagatccaagcgttgctcggtctgaccgacaaggagcgggcgcagatactttccatcaacatggcaaacaatccttcccgaaagtacaaggaagtgtggattggtctcggaggctcacagtcagcagtctatgccaccgaggtgtcgcttgaagaatatatggtgcgcccgtaaagggaatttgacgaatgtcgctttggcaagcgactgggcaagtgtttaaaatgcccattaacaaccgctaaccggaggggaaaaccccacaagggaacatagcacgttggtaaagccataagtcagccaactgtcaggctgcgaccgaatggcaagttaaaatgatagatatgaggataaagcctgcattggttgaacgatagtccgagcagtcgtatccttgggcaatgacggaagacagttgaataattcttcggaattataccgttatgttgcggtactacactgatgacacgtagcaggagtagcataaacttaccgcaaggcaactaccataagtagtaaaggacgaaagtcgtatccgacaatctatcgagccaaatagtcgtcaaatttctaaacggggattgcctaaaccggaaagccagttgtagggctatggggtctgcccctgaatatccggcatggcaacggagcttccatagtagtctgagcagggtaacgccctgtacatggcgaaggggagcagctaattaagtttaacaatttaaaggaagatgtgagagacatgagaaatccagaaaatgtgttgaacagtctgagtaaacacagcggtaacttgaactataagtttgagcggctgtatagagtgctgtttaacgaggaaatgttttatgtagcctatcagaatatttacagcaagacaggcaacatgacggcaggagccgatggtaaaaccattgacggaatgagtattgaccgagttgaacaactgattggcagtcttaaaaatgagacttatcagcctaatccgtccaaaaggacgtacatacctaagaaaaacgggaaaaaacgtccgcttggcataccctcttttgatgataagctggtacaggaagtagtcagaatgatacttgaagcaatctatgaaggtagttttgaacatacttcacatgggtttcgtcccaaacgaagttgtcatactgctcttatagatatacaaaagacattcactgccgtgaaatggtttattgaaggcgatattaaaggattcttcgacaatatcaatcatgacgtactgattaatattcttcgggaacgtatcgccgacgagagatttttgcggcttatcagaaaattcctgaatgcaggatatgtggaagactgggtatttcatagaacgtacagtggaactccgcaaggcgggattatcagcccaatactggctaacatctaccttgacaagttcgacaagtacatcaaggaatacatcaatcggttcaataaaggggtaacaagaaaaggcgacgctcgatacaagctctacgaacagcgaagataccgactggcaaagaaactaaagaatgagaaagatgtaaaggtaaggaaacagatgaccgccgaaattaagcggctacgagaagaacggaacaactatccggcacgtaatgaaatggacagcagtatcaaacggttaaaatacgtgagatacgcagatgactttctgattggaattaccggtaatcttgaagactgcaaaacagtaaaagaggatattaagaattatttgaatgaagctcttaaactggaactgtcagacgaaaagacactgataaccaatgcgcagaaaccagcgaaatttctcggatatgacgtatttatacgtaggtgtaacgatttacgtaaggataagtacggtaaaacggttcgtgcattcggacacaagcctgtattgtacctgaattttgaaacgatgcggaagaaactctttgattataaagccgcaagaatcgcggtcgtcaatggcaaagaggtttggaaatccatcgtcagaacgtacatgctgaacttggatgacttggaaatagtcagtcagttcaatgccgaaatccgagggttctataattactactcaatagccaataacagctatgtcatcaattctttctatcacattatgtcatacagcatgtataaggtatttgcgaacaaatacaaatcatctgtaaagaaaatacttctgaaatataaaaagaacaaggttttccaagtggcatatgaaaatagcaagggtaagacactttaccaatcattttatcatgatggtttcaaacgcaaaaaggttgcagggaatatttactgtgacactattccacggacagtttccataacaggtggacgtaacagccttatggaaaggctgaagctccaagtttgcgaattatgcggtgctaccgataaactcgaaatgcatcacgttcgcaaacttaaagacctgaaaggtaaatccgactgggaaaagaaaatgatagctcgaagacgaaaaactttggctgtctgctcaaagtgtcatgcaaaaatagaccccgaccgaagaatcagactgaattaattagtggagagccggatacagggagacttgtaagtccggttcggaggcgagtactcggaaacctaccatagaaatatgacaaggcgctgggtgcttagcctactgctacaccactgaagaaacggaaaaactggaactcatgcgccttacggacaaactcggcggcaacatagagcttgcaataaggcagctcgcagagagcaaacgtaacagtaagtaacattcaaaaatcaagaaagacatgaaatttaccgaatggataagacatcggattgtcggtcgcttccgggaaccggaccaccgggaattgcaggagattgctcaaaaagccaaacgtcttgccggtgtgtacaatcacggggaacttgcaaagcttatccgggagtacagtcattcggaaaaagctattgaacagatcgccctgctgatagcgaaatccgaacccttcgattctcccatatcaacgatgaacaaggaatccgtagatatgatggatgtattgacggatactccatttatggcgaaacacggctctcaactgacggatatcccaccatgggaagccacatcagtgcatggtttgttcgcaatgtacaccattatgcgtgattggggatgtacgaaatatccgatgaatagaattgaacgcccgccacatagtgaagtaatatccgcaataagaatattggacttccagagaaagagccgggatgtatctgaactatgcgaactcgcctcatacagcatggtgccatcgacctacgtcaagctgcgctatggcattgaggacaaatgcagtacctatgaatggctcgaaagctatctgatggacagggatgactgctgcattgagcctgatgtcaggatgaacattccccgtatagaagccgagatgtgcgcggcggctgaaaaggcggtcgagaatatccccggagtccgtctgccggacttctatcttgagggacttgaccgggagcttgacaaattggggcgtatcgccgtgtcaccggatgcttcaaacgaccttatcaatgtgcaaccggattttctggtcaaatacggtattgacaagaccgcagccccggaagaacaatcccgtcaggcacagaaagcctacaaagaactggataacagattagtccgggttaccagccgcagaccttatgctgacgaattcttcgcatccctcagacacgggaaagaaaaagtggcagaggtagaccgtccgagaccggtgcacaagcctatcctccgtaatccgccgtccaaagggcgaaaaatgggactttgactttcaacagatttttattcaccattaaaacagaaacatcatgaaaaagaaaattctcatgctgtgcatgggctgcttccttgccagcctcacagcaaaagcacaatgggtcgtgagcgacccgggcaatctagcacagggcatcatcaatgccgccaagaacattgttcacacgtcctccacagccactaatatggcgaataattttcaggagactgtaaaaatctacaagcagggcaaggagtattacgacggattgcgcaaggtcaagaaccttgtccgggatgcccgcaaagtccagcagaccgtcctgatggtgggagatatcacggacatctatgtcaccaacttcgagcgtatgctcagcgatccgtattttacaccggaagaactgagtgccattgcccttgggtacaccaaactgctggaagaaagtgcccacctgctgaacgacctgaagacggtggtcaacgagaacggcctttcgatgaacgacaaggaacgtatggacattatcgaccgctgctacaacgacatgctgcaaaaccgtagcctggtgcagtattacaccaacaagaacatcggggtgtcctacctgcgcgccaagaaacggaacgacctggaccgcgtgatggcactctacggctcaccgaacgaacgttattggtaattattcctaatccgctttcattatgttattgttggctatagattttgacaacctgcatcagattttacagaatctgtatgtggaaatgatgccgctctgctcaaagatgaccggtgtggcaagaggccttgccggtttgggagcgcttttctatgtggcgtatcgtgtatggcaggctctggcccgtgccgagcctgtggatgtctttccacttttgcgtccgttcgccttggggctttgtatcatgttctttccgacactcgttctgggtacgctgaacagcatcctctcgcccgtcgtgaaagggacccataccatattggagtcgcagacctttgacatgaacgagtacagggcgcagaaggacaagctggagactgaggcgatgaaacggaatcccgagacagcctatctggtcgacaaggagacttttgacaacaggctggacgagctgggcgcgtttgacgctatagaagcttgcggaatgtatgtggaccgtgccatgtacaacatgaaaagggccgtgcagaatttcttccgcgaactgctggaactcctgttcaatgcggcggcgctggtcatcgacacgctgaggacattcttcctgatcgtgctttcgatactcggtcccgtttcctttgccatctcctgctgggacggtttccaggcttctctcagccagtggttcgtccgctacatcagtatctacctgtggcttcccgtaagcgacctgttcagcagcgtgctggcgagaatccaggtattgatgctgcagagggacatcgaacagctttccgacccggatttcatccccgacagctcaaacggggtttacatcactttcctcattatcggcatcatcgggtatttcaccatcccgaccgtatcgaactggattgtgcaggccggaggcggtgcgggcaattatggaaagaacgtgaaccaggcggcatccaagacaggctccgtggtggccgggactgccggagcggcggtgggaaacattgccggcaggcttatcaagtaataacagtataaaacatttacagaatggaattcaaatcattgaaaaatatcgagaccagcttccgacacctgcgtctgttcggaatcgtctatctgtgtgtatgcaccctgcttgtgggattttccgtatggaaggcttacagcttcgcggaagcgcaacgggagaagatctatgtgctggatgaaggcaagtcactgatgctggccctttcacaagacctggagcagaaccgcccggtagaggcaagggagcatgtcagacggttccacgaactgttctttacgctctcgcctgacaagaatgcgattgaaggcaatatccggagggccatgttcctcagtgaccgttccgcctatgcccattatgtggatctggcagagcagggatattacaaccggataatttccggtaacgtgaaccagcgtgtagggattgacagcgtcaagtgcgatttccatacctatccgtatgaggtcgtgacctacgcgaagctttccattatcagggagaagagcgtgaccgagcgcagcctcgtcacgcggggcaggctgctgaactccacccgtagcgacaataatccgcacggcttcatcctcgaagccttccgtgtggtggagaacagggatataagagtgtatgaccgttaaaattcagaatgtatgaaaaagatgtttgtaaaaatcaaggaatccgtggaagaaaagctgcggaagctgtgttccgggcttagcccggaaaagagagtgccggcaattgtcgtgctggctgccctgtttgccatcggaaatttctatatgattttccgtgccatccatgacatcggacgggaggatgtacggccggaaatcatagagatacccccgatggaaattccggatatcgttcctgccgatacactcccggataaaagggtgcaggaaatggaagagttttttaaccgattcaatcagaaagaaaatgggtaatgatgtcaataaattgaaacagaggctggaaatcaggaaatacctggtttttgccgggatgttcctcctgttcctcggggcgatgtggctcattttcgcaccgtccgaagaggaaaaaaggaaagaggaaaaaaatgcgggattcaacaccgagcttcccgatccgaggggagcgggcatagaaggggacaagattgccgcctatgagcaggctgacatgaaacgcaaacagacggaaaaactgcgtacgctggaggatttctccgagatggcagatgggaactccgggactgtcgtggaattgtcaccggatgcggatgccaaggatggcagttcacgtgaaggtgacagaaggaatgaagcctgttcttcatccgtctccgcctacaatgacatcaacaggacgctcggcaacttttacgagtcgcctcaggaagatccggagaaggaggctttgaaagccgaggtggaacaactcaagcaggcggtcgccacacagaacgcgcagccgggttacgaggagcaggtggctctcttggaaaaatcctatgagcttgcggccaggtatatgccgggcaatggcggtgtgaatacggacagccgttccgataatgaaagtcccgggcggaacggaaaggcgaaagccgttcccgtgggactggtttccacaccggtggtatcatcgttgccgcaaccggtcagtgattctatacagcttacgggaatggcacaaccggaaagattccacacgccaatcggtaataaagaagagagaaacgtgaggaataccatccgggcctgcatccacggggaccagaccgtcatcagcggtcagggagtgaggatgagactgctggagccgatgcgtgtagggaagcatattctgcccaaaaactccctgcttaccggagaagggcgcatacagggtgaaaggcttcacgtcaatatccttcaggtggaatatggcggtatcatcatccccgtggaacttgccgtgtatgacaatgacgggcagggcggcatattcattccggggtcaatggaggctaacgctgtcagggaggttgccgccaatctggggcagaatctcggcacgagcatctccatcaccaaccagtcggcaggcgaccagctgctttccgaactcggaaagggtgccatacaaggtgtctcgcagtatatatcccggaagatgcgtgaggagaaggtgcatctcaagtcaggctataccctgatgctttatcaagacaacgatcaataacaatccattaaaattcaatcgacatgaaaaagttttttgtaatgcttgcccttgcatggggcactgtgggtgctttcgcccaaaatgaagccgacagcgtagcggcggtaaacaatgccatcacactggccaaggatgtgtatcctcaaaaagaggaggacggagacctctatcacggtctgacccgtaaactcacctttgacaggatgatacctccatacgggctggaagtgacctatggaaagaccacgcacatcattttcccgtcatcggtgcgttatgtggacctcggttctccgaacctcattgcaggcaaggcggacggtgcggagaatgtcatccgtgtaaaggccaccgtgaaggacttccgtgaggagaccaacatgtccgtgattaccgaaagcggaagtttttacaccttcaatgtgaagtatgcggaagagccgctgctgctgaatatcgagatgaaggatttcattcatgacggaagtgaggtgaaccgccccaacaacgcccttgacatctacctgaaggaattgggctgcgaatcgcctaaattggtacaccttatctcgaagtccatccacaaggacaacagacggcacatcaagcatatcgggtgcaaggcgttcggcatccagtacctgctccgcggactctatacgcacaacggcctgctttattttcatacacagataaagaaccgctccaacgtgccttatgaggtggatttcgtgacttttaaaattgtggacaagaagctgatgaaacgtaccgccatccaggaacaggtgatattcccactgcgtgcttacgactatgtaacgtccgtcgcgggaaaaaaggacgggcgcaccgtttttgtcttcgacaaattcaccatcccctcggacaaggtactggtggtggagatgcacgagaaaggcggtggcagacaccagaccttcaccgtggaaagtgaggacatcgtgagagccggggttatcaacgaacttaaagtgaagtagccatgaagaagtatctgttcctttttgttacagtcgtgtcgcttgccctgttttcagggcgggcgcacgcccagcggtacctgcccgggatgaagggcgtggaactgcgcggaggatttgcgaacggctcaaagtcccccttgaattattataccggatttgccgtttccggatacaccccaaaagccaaccgctgggtcataggcgccgagtatctgatgaagaactacgggtatcggaatgcgagcgtaccccgtgcgcagttcacggcagaaggcggctattacctgaaattcctgtctgatccgacaaagacggtcttcctctcggtcggcggttccgcactggccggctatgaaaccgtgaattggggagacaggatgctgtttgacggttcaacgctgctcgccaaggatgcgtttgtctatggcggcgcgataaccctggagcttgaggcatacctgacagaccgcatcgtccttcttgccggtatccgggaacgtgtattgtggggaagctcgctggacctgttcacgacacagttcggtctgggcgtaaaattcataatccattaaaaccgtaccgcttatgactatagaagagataagagacattcctatcgccgtttttctggcacggatgggatatgaaccggcaagaagacggggggatgaatattggtatctggccccgtatcgggaggagcgcaccgcctcgttccagctgaatgtccgtaaagatatatggcatgacttcggtaccggacagggaggcgacatattcacccttgccggggagtttatcggcagcggggatttcaaggcgcaggccaggttcataacagagatatggggcggtcttgctcccgaacacaagaccgttttccgctccggggaaaatgacagggaggattcccataggcaggaaagtttcacgaaggtacagtccggaccgctgcacaacagagtcctgctccgttatctggcggaacgtggcattagcggtgatgtggctatgccgaactgcaaggagatcaggtataccttgcacgggaagcggtatttcgccatcggtttcaggaatgtcagcggtggatacgaggtgcgcaaccgcttttttaaggccagtctctccccgaaagacatttcgctgatggacaacggttcggatacttgcaatctcttcgaggggtttatcgactgcctctcgtggatgcaactcgaattgggatgtggcgacgactatctcgtactgaactcggtggcattgctggaacgctcgttccccgttcttgacaggtatgagagagtcaactgttacctggaccgggacgaagccggacggcgcacgctggaggctctccgcaaacgctacgcggataaaatagtggactgttcctctttgtacaaaggatacaaggatctgaacgaatacctgcaaaacaagtttctgtaaaaatagaattaagtataacgttttaaaatctgattgaatatgaatgcattgaataaaaaaagaggattggtcggaatgacggcaatcctgttcctgggtctggtggcttgtctgttgtccgcctgcaatgatgaagtggatgtacagcagtcctatccgttcaaggtggagaccctgcctgtccccacacgtattgtgaaaggcgagacggtggaaatacggtgtgaactcaaacgtgagggacggttttccgatgcccgctacaccatccgatatttccagccggacggcaagggtacgctccgtatggatgacgggatggtgctgctgcccaatgaccgctatccccttgacagggaggtgttcaggctatactacacttctgaaagcgaggaccagcagacgatagacatctatttcgaggacaatagcgaaccggcacagctttgccaattgacttttgacttcaacaacgagacggaggacgaggattccgtcgtgactgcggatagtaaggaattgccgatcacaacagtcagacactaagccggtcctgcctatgatgaagttaaaagcaatatggtttgcggtgctttccgctgcggtctttttttcaggtatgccttcaagggcggagaatccggtaaaggcaagtccggacaagttcagtcttgcggtcgagtgtgtcaagcgattcgagggttggcatggagagaaaaagcattggccttatgtcgggtggggtcacaaagttcttcccggggagaggtttaccaacggtattacaaaagcacagggcgattccattctgagagcagacctccgtaagttgtgccgcatgttcagttatctgggacgtgattctttgttggcagcagtcctttcatataatgtgggaccctacagattaaaaggatatgggaaaagaccgaagagccggctgttgaagaaactggagtcgggcgaccgtaatatttacaaggaatatgtctctttcaggtgctataaagggaaagtggttccgagcatcgaacggagaaggaaggtggaattcatgctgctttttgaagagtaattgaaaaagggagaacctttcagttgttatcactgtcaggttctcccttatttctttggtttgagaagcttgcatgtcagtttacctgaacggcatcctgtacttccagctcttccggcagacgggaaagcaggagttccgccatggctccgttctgtggaataagggccgggaagtctgtctttccgggcttgtatatctctgtggctatattgtataattcccaagcggtaatctgtcctttgctcatggccagtttaagcacctcttccgtgaagatggaaatctgtccctggttcagtggataggtttccacggaggatgagaggtccctgtccgaactgtcgtgggagacacgcaacgcggtcagcagacctatgtacatatagatttcctccatagatataatccggcgtttcaaccgttgtatgcgttcgatgtcctcgttcatgttcacctcgaaattggccagccaaccatccacggtttcgaacacctcttccgtcgagactttcttcttgccgtaattgcagacgcttcgctcggatgaaaggatacactggttatgacagattagcacgcaggggcctatggctgcctgtatgccgtcctggtggtaggcgatgaccaatgtcgtggtcagttcgtccgtctcccaatccttgatccggatggtagcgaaaatacggcgcaggatatgggcttccacggctttttcgccatgtgtctgttcaacctgcgggaggatgctcactcccggctgtgtcttgttcctgttctgggcagcgaagatttcttccacctcatagtcgagattgtatttctcgcagatgtccatcatgcgccggatgacctggtaatggtagatgccctgcaccggattgttgtagatgtcattctctttataggtgcgttgaagtgtctcgaagttcatcacttcaattccgtttttctggaagtcaaactgctgttgtctttccattactgccaatgtcgtttccatattgaattgaattttataaagttaatattgtcgtttgcctctcatcaggtgtgtatctgccatccatggaacggctgtagtgtcacggcgaaagaacggtccggtattccgtgatagagcagaccgcccacgatgcctgtccttccgtcgggatagcgttgggtgaagccgaacgagtacggggcatggtcatagtagagtgagatttcgctgggacagtcaggattttcttcccagctcttcaaccgttccaggcatttctggagtgagatgtcaccgatggattcggcataacgctttacattctcgaaatgttcttcattcaggattttcatgattcattgtattttatctgttaaacacgtccggctccgggagccggtatttttatttctcgcctgcttgactgtcccgtggcagtacccgcaaggtttggcgaaagaaaataccgcagccgtcaggcgaggatgattttctttcagccaaccccgcaaggggcctgaccttgacagggtacaccggacacgggactacctttgcagggtgggaaataaaatacacggtagtgtgctttgcatggtctgtggcgattctcttcctgatttgttcgccattgccggacaaatggtgtatttttgtaatttctaatttcaggcttatggaaaactatataaagaaagcggcggatgctttccttgtggagcgtccgtacggtatgcgtgtggattacaggaagaaaggattcgtgctgtttaaccgtaacctcaatgtgttgggaaatgcggaacagacccgtctggaagaactgcctctggagcggttcaatgtggaggagattccgttggagggtgaagtcgtggaggaacacgcaggatttaccgatgtattcttctataccgatctgaccaatccctatgccggatatgtactgaatttgcaaaagcttaaagcctataaccggtttatgtttccgctggcaatggcgctgaaccgtgagttgtgaggccggaagatggcagcggtaacagttgcatgaagcaggccgttaccgccagcatttattgtttgccctctttttctgttatgaacgcaagataggcggacacggccttatggcatccggtaaagtccggagtccggtgacctttgattttccggtaactgatgcttccttccttatttatgcccataacatgcctgttgaatgtccctttggttctgatatggatgtcaaaaccgtcccttccggtgatttcaaggaacattcctcccgtgatccgttccccgtccaggaatttctgtttctgttcatcgagcagccgctgatgttgctcttcccgcgctctgcgctcttccgcctctttctcctcccactccctgcgtttctgttcctgcttccttttgtacgcctcacgggcttgcaccaagggggtggcgtcaagtccgagagcctcgaacacgcggacggagatcaacctgacgaaggttcctctttccgcatcctgaagcgtatccgcgatccagttcctgcaataggtggcggcttcctctctgcaaccttctcccttgagaaaccggcgtgaatactgcccgctggaaaaataaacgttttcaatccggcagaccacatggaaacagtcatcgtcttcattcccgtcttcgttctttctcgacagggagagatatacattctccgcatacggctccagttccatataaggagccacgacggtattcccgtcagacttgtacttgaacacttttgctttcatattatcgttcagtttgtcggttgttgaatatttcatctataatctctttcccgcttctttcacccttcaggaaggcaaggaagcgcctcaaaaagagccgggcacagtcagtgcccagttgggagctttcaccgtctttggttgcgcataccgcaaaacgccccagtccgaaactgtcctgttgcggtatgatgtggtaagacaagtcctcgcttgcgttgatgtgcaacccacgacggaaaacatagaaagttttcgggattcttctgtcggtatcgatttccatacgcttgtaaccgtggtgttccaataaccggaccagttccctgtttgtcggaattgtatgtccgatccagtccggccagcttatattttctattatgtgtccgtaattgtcatataatatgttgaactgttcctggtattcatcgtaaaattccccgttcccgttgcacatttcctccaacgcgatgccgtttttacggacaagggcaaggtcgcccagtccacacgcgatttcattgagcagcgtgcgttcctcatccctgtcttttgccgttccgtaaattctaagcagggaataccggtgtagcgccgaacgggatggcatatccagtttttcccatatcccatcgtctcctatagcctgtctggtgttttccggaagtccgtaccaccacttgtccaaattgtttgtatccataattcctgaatcagattgttttcaaattctgttttgagtaccatgcctgatacgcggcggcatactcctgacgttcccgttccagggaatctctcatctcaggggtgtacccgagcaggcggatgtatcctccgttatagccggtgagttcgcaccttattccggcttcctccagtttgtcgatgcgtttttgggccatttttgcgcttgaatattccttcggccaaaaatagagttcgccccgtgagccgaaacagtcttcccccagaattatttccccggcatacttccggctttcgatgaagccgaaacgcgctttgcccaatgcccggcgcattgccttgtgtgccggaccttccggatgcttgaatacctccggcttgtctttgctgccgagtctgggcggttccaccttgtacggctgtttgtaacttccgattccgagcgtcaggtaaaagttggtatggaaatagtccgtcatggggtcgctgtcatcgaaattgtacgacatgatgaaatcgcagatattcatcattacttcttttgccctgtccgtcaaggatttgtctgaatggatatgatggtggttgacatcgccttgaacttttccagactctttggtgaacgcctcgaaatccgctttcatcaaccggatatggatggagtggcaattctcccgtctgacggagaacttgtatcccggataggtctccttgagccatgcccgtaccagttccacgatttccggcgcgtgctgtcccttgtaattgcggcctttccagcggtattcgttatacacgtactcggtgtattcctttgccgtggctcccggatagtcatgttcatatccggttgaagccgctgaaacatccggtttgtctttccatatcccgtacagtttttcaaactcggtgttcacccgttgcatgattgcagtgtcaccacccttgtccggatggtgctgcaatgccaggcagcggtattccttcttcagatccgccatgctgtgtatgttctgaaaataagccatagccataagtctttatgcccctgcgaggcggttgataaaatattcctgataatcaaggtcaagcccgaggttgctgcacgccatcccgatgtcgtctcccctcaagtcatccgcttcctgcaattcacgcaggtatctgatttcggaatccaggtattcctgcgcttccgtctgactgcaaccgcatgagttacttatcagttcaatgatgtttgtctgcatatcattcgttgtttgaggtatgtttattatagatttcccgtttatattcgtagtcccggctgttccaccaccggcctgccgcatcgacaaatgtctgcggactttcggcaggcggacagtcacagactttcaaccctgtgatttgttcttttgactcaagaccacatgactcccaccaggactgcatcttttgtgtgaattccgctttggtacagaaaaaggtctggtcaacgcattcttcacaccatttgccgtcacaccagtgcccgtcattgtcatcatacacatagctgatacgttcatccgtgttggcgtttatccatacttgaatttccaactgccgtgagccgcattctttgcatacaaggatgtcggaatcgtccggttcttttcggaaagccctgccgtcataaagcgtaacggcacgttcaacaagtaacttctgatagttctccgacaatccggcaaagaaccgttccgcggcaccgaaaatggcattgtctgccgacacggaccatttatcccaaaagtgccggtacatatctccaaatactaccttgcattcttccttgctccaggcgttccacatgtagtagaagaaactggagactgcattttccgcctgatatttcatggttcttccgttttgggttcaacatcttttgtctcttccaattgccgccatgcagcatcgtacatttcatagagccagtctatattccttgcaccgagttcaaacgggccgtagcattccacctcatcacggctttctttctcttcggcaatgacggtcaggctgccctccattatccggacacccgttacccggcattcatacgggtctccgtttttcccgaaccagattatccataccgggtcatcttcccggttcgtaaaggcaagttccgccagtgagtgcgcctgaagcaactgccgtatcgcttcaatgatgccattacgcagttcctcaatccggccgctgaaattcatcgcgatgtattttgcccgggctttcctgcccgtttccttgatcgagagtatctgcgattcgggatggatgccgaagttccagtccgttacctcgtcatcatcgcgtgtcgtgtggatattgccgcccagtaccagaccgcagtcttcctctaccattctttttgcttcttcgcggtttcctgccgctaccgtgtaagtgccctcgaaggcgtatcttacccttacttcatattttgccatactcctataattgggttgttgattgttgatgttacatgattgattgttgtcctgattcctcgaaatatgccggtgatatccggtacagttcgggaaggttcagttttaccatcgggtattccacccatccgctcctgcgcctgtaacccgtatcttcggcaagattgtatcttatgagaaagtccatcgcttccggattgttgttgatgtcaacaaatgccttgtcaggaatcccgaaggccggaaagtcctccagattgacggtcagtaccgtataagcttccccggtcttcggtacttccaggctcaaggcaagccagccattcggataaaacccagggacaagtttcaattttcttttatggtatggatatgtcttgccatgccggttctgaccggaatccatgatttcgaaatcttcttcgccttcagtaaatgaccgcatcgggcaggatacatcataatagcagccgtcttcgtgacagcacaggtattcctttccttcggagaggatgatgacatatttcttttccatgactttatgattttaatggtggatacttgattttatgaggcgacaaggcttatcctctcaccgaaaaaggagtcatccaccccgtacacatgccggatggagcattcatacttggaacgttcgtcatccagccggaaacggaaaccgtgatagtctttcacttccaatttcagccttacgtctttcttcagttccatttcaagcaggcttccgccgccatatgttgaactgaaaagtccgcaacagttgcctttggggataacgacctcttccaatgaaaagccggcttcatacagttctttcaggttcaccctgcctatataggtcagcaggtttgccccgcagcaggaattgataagctcctcatagaactgttcgtataagacctgctccctgccgttccggtttttacggttcgggaaacgcccgtaggccttgtagccgtgctctgtcaggattttctttactctcgccggattgaggttcaggctgtccaccatgtccccgaaataggactcctcgtacctgtaaccgccctgcgattcaaaccagtgggagttgatgcagtcatagttggaaagcatctccacctggatggggatgtcgtccgtatgccttatcagctcctttatcacatccgaatcatttcggctgtaaatctcgtcacggatttcatcttcgtgctcatcgaagaaggcatccacatcctcttcgtcaaagtcattaaagacggtacattcctctttcagtttcgcgatgattccacggacagcctcccattcggcatcgctgtaccacacgtccgcctcttcccacaaatgctcacagctcttgctgtcaaggcatttttggaccagactccggtggttgtcaagattgtcatcatagtccgtccataccagcgtataggccggttccatcagggatttgatgaaatccaatgtcaatgttttctgttcatccatttctgttacctgtgtacggcagggttccttttcccgtacataccgttataaatgacagaagcggccttcaagccgcctccgtgttgtttcctaaccatatagttccttcacgatcttgtcgtatatttcctttgccatttccgtattccggttgaagtggaaataagccgtgtatctgtatcctgttcttggcactcctccgcactgctgtatcgccctgtctatctcccagtcgatatcacctatgccgagggatatgcttgtgccatgcagcatacaccgggcgagtttcaatgcggaatctttcttgtcgtccttgcgtagcctgtcgaaagccatcagcgcgatttccttgttgcttatcgttatggtgtccatattcctgttcagtttaatgtcagacagcttttgttccgttccctgtcacggcttgccagcaccccgaaatggatgctgaatatgcgccggctgaagcagatcggagaattgtattccacccgttgccacagggtaaagtggtcgtcagagaatgaccatctgaaatatcctgacaacgagccgaacagcggattggtattcctgtttatcaggaacttgttcacatccacgatgtgccctgccgtcaggagaatgttcagtatctccacaaacgccatttgcgaataggggtcaaccggcattaccggtcctttgaagttgatttccatcctgtatatgttttaatcgtaattgtcgtcgaatatctcgaagcggggaatacccgtgtcgaaatagttgcttgatatgcccggatagtacagcaggctgtcatccatgttgtccgggcaaggctcatcgtcgatataggtcgcatttccataaagttcgatatagtgcgccaccaacaggtgagggtcttccgtgctgatgtcatgcccgtaacggtcacaccagtcgaagaaacaatccttgtcgggttcctccagctgttccatcgcctcccttatctcgaagaagctgggacacagccattcccggttgatgagcaggtccggaatctccttccatctcgtgtacctgtattccggtgtctcctcttcggcgaacagttcggaacaggtgcacaggaattcccccatgtcgccgaagtcagacatctgcaaccagttgtccttctcctgccttgtgtctatgagatgctgcgtggtcactgccacttccgcttgattcaagtccataattcttcatttatcagttaatgattggaaccggggatttcattccacaggctccaaaaggtccgcaccccggcagcgcagggtttttcggggaaataccggagcccccggcgaggatgatttccccgaaaaccgcctgcggcctgaccttgccctgccggtaagggggtgggctacctttgcctgtggaatggaatctgcggtttcccattagttttcccttttttcaattcattatgcgctggcttccccagctgatgtgtatcctgccttcgctgtcgcactcccttaccagcaggctctcgatgacggacatggtgacgtcgaactcctcgaagatctcggactgttccttgacctcacccgtcttgatgaactcgttcagccgttccttcgtaagtaccagcgccattaggttctgctccacggaatccttataggtgacataatgcacgtccttctgctctttggagtcaagacggataaatcggaaatagaactgttccatcttcgggatgttccattgcagggattccagtatcacgtcgttgcaggtgggtatgttcaccgaactgctcaggctctgctgcgtgcagaccagtatgccgttgacggtggaatcgaactccgtcacaacgctttgtcgtttcttgaacgccacgtctcccttgaccacgaatacaggacgctccgggaaacattcgcggagacgcttctcgtaaaggtcgaatgcggctatggacgtgcaaccgacagccaccttgccgggtatcttccgcaccagcctttcgatatactttgtcttgttcggaattccgtcgccggaatagccctctatcaggtgggggacggaacaggccttgatgagcagcttgatctggcgcataagccggagaccggcatccttcttcgtgtcacccgtgctgttgtaatacagctcgcagatgcggcagaactcctcgatgatgacacggtaaacctcacgctcgccgtcggacgggctgacggtatgtgtccgtatcctgtatttctcgcccgcgaaatccctgaacttgcgggtgatgacggtcttgccgataagctctgccagttcctccttgttatagacatcctggttctgtttctcaatgccgaagacggtggattttcccggacaatggcaggcacggaaaagcacatgccccctgaaagccgagaacggttcgccgtaatggggatttgtgtcttcctctatctccttgtccttgttatcgtggtacacccggccgctccaacaaatcatattgacggagttgttatagagcagttcgaactggctgtacagttccgcgatattgttgcgggtggtcgtgccggtgtcgagtatcttgtacctgagacggcggaagaggcagaggatatgccttgtccgctgtgacgacgggttggttatctcgtccgactcgtcgaaaacgaggcacagttttcttgaggtgcgcttgacaaaccttgccagcccccgtttcagcttgctgagcatggaggtggagaggatgaggaacacgccttccggcaccgtttccaggtcggcattgcaccttgccacacggaactgttccctgttcattgagaggaagggtatccatgtcatgttggtggcgatggcgggagccagtatgacggcattccgtaccttgcggtatttgagcaggtacttagcgcggtggtacacggcggccgtcttgcccgagccttgctgccagttcagcagcgcatagcgtttctgcaggacaaggttaaggtcgtgtttctggagcgtggtgaactcacatacgtcaccgtccttgttgatgaaagtcgtgcggtcaaggtattctttcagcctgtcatcttcctccatctccgggaactgccggtcctgcatttcatactctctccgcttgcgccgtatcagtttctccgccgcacggatttggcgcatgttcttttctgtcggcacttccggcatgggcagttcggcacgctccagcacgaggtcgttgatacttgccgccttgtgcggaactttgtccaacagacgcggcgcatattgtttcagtttgaatccgtatgaggtcttcaccaacgccacttccttgcgaggtacagtattttgcgaggtgatgtacctgcggatgacagcaagcactttcttcggggtcagcttgttcttctcccattggttcacctgttcccgtgtggcgttcccgggcggtttctggttgcggaatttcgtgaccaaagcctccgtcttgccgatatacctgttcaacttggcgtgtaccttcaactcgtacatgtacttggcaagtctgtactcgaacagttcaagctcttccttgtcgatcctgttggtctcgcgcatcaggtcgaaacgcaaccggtgtttcatagcccttgccccgccgatgcgttttttcaattcttccaccgttatgaattcctccgcgctgtaagcccgcatcccgatgtggaccgatttacggagaaataccataatcttcgtattgaaatcatggactccggttgcagcaaaggctgacggggccagcttcgtctgaccgacaaaggagaaattactgtttatgccggctatccgtgtcttttcccagaatccgctctgcatgaaagagccaggcacgattatcatcaggattcctgccggattaagcacatcataagccttgtccatatagtattcctgcgacagtttgtagtcgaacttcaggttgaaaggaggattgccgatgacaatatcgaagcgttgttccggatagtattgccggaggtcgcatttctcgatatgcgcgtcaggatagaggtatcgtgccacggaaacggccttgccgtctatgtcgaagccgtaggcgttatgcaggttgggcaggtggttgaagaaattgcccatgccgcagcacatgtcaagtatcatttccgaggaggtgggagaaagcatatccgccatgtcccggcatacttcatgcggggtgaagaactgtcccatctcggattccttcttcgcttcggcgtactcgtggtaattggcaaaatcggactgcttgaggttgtgcagtcctccgatgccggtgtagcagttgtagatgctctccgccggaatgaggtccttgccggagtctatggcgaaaagtatcttttcgttgacctcggcacgcatatcttgcgggatctgttgggggatgatggcatacatggctttatctgtttatcgttgaaaatgaaaacaccccgcaaggatcggcttacggggtgttgtgggattcttctcatggtcagttctctctttgagtgatttcatccagccggagacgtttgaagcagttcccagctgccgcgctgtccttgaaccggacatcgatgcgtccgttcttgtagaaccggatctgctcggcattggtggtcgtgaggtcgtaccagtcagtgacggaaacatcgttgtcatcgaaacggatgatcatctttgaattcccgttcagtatgtcgtccgcaccgtaggcgatgccggcgcacagggtttccaaatccccgccatagttgtaactgattttgcacctgttgttgtattgtatgtaataatcgtcgaaacggatgatttcgggaaatacaatcctgtccttcttcagctccgtcttgactttactccagcaggaaggtttgacgactctggcaaccctggcaagaagttcctccaccgccgtttcccggaaactcttgccacccaggtgttcgataaccacatctacatatgtcccatagacaggacgggagcccatctgaagggtcttttcgtctattttatattcagggaccgacacgttgtaagtcctgttgaaataagaaatgatgcggcccgcaaagttcgcgttggcgttgcggttcttatccaccaggtcattgatcaggtcgaacggcttgaactcgttgtgagaatagtcgtccctgttgttatggtaagtatagaaatcccgcatggacaccttgccgttctcctcgtaatggaacttgcgctcggcttgatactgttctgcctcctccttgaagacggcgtaccaacggtcaatctggtcgagtgtcttgtaaagcagttcttgctgcatctggcaatagagccggtcttgttccgtaatcttgtcctcgtttctcacttgtacgctcaggataccggaaagcaggtcgggagcgttaccggccttggtcactgtcgtttgcatatctgttggattttaagtgttagaaattatctggtttgattcggtagaagtacgtgatgtgcttttccatgtccttgactatcttgacctgttcggggtggaagttgagcctccgttcttcggcaggggcatcaaccgttttccactcggcggaaggtagaaacacatattcccgacggaaacaccataacacgatttgattttcccaatttcccttgaacaccgttccttcgtagtccttcaggaactgccagaactcggcttcatcccggaaagcgatgtcaaagccttgatagaggttgccgctttccgattcatcccttttgttcaggtaaaacttccggtaggtctctgtcgtgaaatctccatacctggaattgggttcggcatagaaccataaaggcactttggcaatgaacgtcactgaaccgttggcgcatgcaccgcagtgtccccagtccttgaacgctccttccgtccatttcaggaatttcatgtccttcggatttacggagtggaacgctccgccgctgacactcagacggatgctcccgccttcttcccacacgaaaggaacatagggctgttcgcatatggataggtatccttcctttgtacttttgccatcaataagagcgttcccgtaataatccccatgttcggttacatataccagcctgtcgccgatttgcggtgtgacttcagagcgtgtccgctcgataagctgcacatgattgttggccatatccacatctttctgtgtcagtccatgttcatggtcgtatgaaacattccgttctttgagtgtctcgataccgtacttttcctttgttgcctgttgtagcatgacaattatatttttttgttagtccggcttttcggggccggagttcccgtaactacaggctatgaaaggccgtgtcccgtacatgcaaggttggcgggaaaaataccgcaagccctccgggcgaggatgatttttccacgacacccggagggcttgaccttgcttgtacgagcaggacacggggtacctttgcctgtgagttaggggaactcggcttcggtatgactgtcatgtccgatacaggttatttcattggttcatcatgaatttgtacccggaaaactccggtattctcagaaaaaatgctatctttgcatcgaaacaaagagttatttgaaagcatgaggaatatagtgattctgaacagtccggcattttcttatccgttgcccgttctcatgcgagttgaatgtaattcgttgatagtcaaataaaatacttcatactatcacaaatatacaaaaaaagagagagaaatggttatttattttcttaaaaattattcgagtgtgatatgttttacgctaatctgctgtttcaggaaagtagaggccgattctgaaaacttttcttccgcttcggtcgtgtaaaactggcagttgccattcttggtacatttggcatccatttcgggatgtcttttcagatagtctttcaggctttctgcaacatactctccttgtgcaattacactgatatgatccgggatgtattgccggattttaggtaggagtatagggaaatgggtacatccgaggatgacagtatctatttgaggatcctttgacagtaattggtcgatgtacttccggataaaatagtctgctccttcgtcttgtgattcgttattctcaactaaggatacccacatcggacatgctgtcccgctaacctgaatttcaggaaatagtttatgtatttctaatggatacgattcggatttgatggtgcctgctgttgccagtacgccgatatgctgattcttgctaatctctccaacacattctacagtggggcggatgactccgagcacacggcgggcaggatcgatttggggtaaatcattcatctgaatgctgcgcaaggctttggcggaagcagtattgcaagctaatataaccagatggcatcccatatcaaacagtttgttgacggcttgccgggtaaattcgtatacgacttcgaaagaacgtgtcccatagggggcacgtgcattatctcccaaatagatataatcatattccggtaatacttctctaatcttgtctaagatggtcagacctccgtatccggagtcgaatactccgataggtccgggcgtatgggatagatgttgcttcatgacacacttgatttatatacgcaaatgtacaccaaaaaaagggaaagagaaagaagatgatccttctttctctttcccttttggtatttctttattcttggtcagctcttatgtgataccaagatttgcttttaccttgctagtcaagttgatgctctgtgattcgtttacataaggaatcgaagttcttgccaggtcgaagatatagatcacaccttcagcagcacctactgctttgatagcattgtccaacttctggtagataggagccattgcatcattttgagctttctgcatttgttgttgagcatcctgttggaattgctcttgtctctgcatcatatcttgcaactctttctgtcttctttcagcgatgttaggaggaagagaatccttagcgatagcttgttggaattcctgatatttcttgttgaattcttcctgcgttctctgtagttcggcagtaagttgtttttctaaagtctgaatatcattttgagctttggtgaattccggcatcacagtgatgatttcctgtgcattaatgtggccgaatttcaggttctgtgcaaatacacccattgggagtgcaagcaacattacaagtgcaattttttttagcatagttctataatttatttgaatgatttttagttatttccagctgcaaatgtatgaaattaatttgaatatcctaattttcttaggatttcatcactaatatctatgcgtggatttgcaaatattatacctgtagcagaggctctgtcaattaccatatcatatccatgttgctgtgatatagctttcactgcttcataaatatcatcctgaatcggagtaatcaacttgtctctcatcttggctaattcgccttccggaccgaagtagttacgcttcagctcggctgcttctttttccttcgctacgattgcatcttctgtctttgttttttgtgcggcagaaaaagtggaagattttgcctggtaatcctggaacatcttctgtgcttctttagccagagcttctacttcactctggtatttcttcgtagcttcttgcatttgctcgttagcgctttgagctgccggaatattcttcataatatattccgtatcgatcagtgcaaatttctgtgcatttgctgccatgctgacagcaaatagcatcatgattaatagaacagactttctcataacgtttagtttttgatgatacattagaattcttgtcctaagataaagtggaactggcttcctccatattgtttagaaccaaatactttgtcgaaaccgtaaccccagtcaatacccatcataccaatcatcggaaggaagatacgaacaccgacaccggcagaacgtttcaactcgaatggattgaatttcttgatatcatgccatgcgttacctgcttcaaggaaacctaacacataaatgttagtacttgtttccagcatcaacggatatctcaattcgataccgagacgtgcataggcataaccttcagaaccgtatggtgttaatgagctgttttcgtaaccacgcaaagcgatactttcagttgcataagttgaataaccggtcataccgtcaccacctacgtcgaatgtaccgaacggagatttcttgtattggttatagtgacctaacagaccgaattccgtacgtgtcattaataccagacatttaggatgagcaaccggatccatcagcggagtatatgttttgcctttgaatttccatttgtggtattctatccatttatgaagtttattcatgttgtcctgggtaatgctacctgtttcagggttgctgtaatatcccttatagtctttaccgtccatcaacgagtaaggcggtgtgaactgaactgacagtgagaaatctgaacccgaacgagggaagattgggttgtcaatagagttacgagccaaagtcaatgaaatgctaaggtcattacatttaccgttggtgaccgggaagtattgccagtcgctcaagttataacgttggtaagctaattctgcagaaagagtgaaatagtcatccggccatttcagacgtttaccccaacctacggaaagtccccacatcttgatagatttatcagggtcataatagttttcgtagttgttatagttaccatagttgtacataccataaccaccgtagccactatacatactgttgtagtagttgttgaagtagctggagttgtagtaacggctactgatatctgtctgtacagagaagaatgccgatacagagaatgaattcggacgtttaccgccaaaccatggatcgaagaatgaaatactgtatgattggtagtatttagcgttcgtctgtccgctgatagtcaatgtctgaccatcaccttgaggaagtataccacggtagttttcacccgggtgcaacaagttggctacagagaagttggtaaacttcaagctcaacttaccgataatacccgtctgtccccaacctgcagagaattccacctggtcgttagctttggaagtcaaaggcaaacctatgtcaacagttccgttcatcggatccggttgaatatctggttgcagtttttccgggtcaaagtgtcccatctgctgaatttcacgcaaagaacgcatcaagtcttctttgctgaacaattgtcccggacgaatacgaagttcacggcgaacgacgttttcatacaaacggtcattaccactgatcttgatcttattgatagtagcctgacggccttcatagattctcatttcgaggtcgatagagtcgccaacgatatttacttctaccgggtcaaggttatagaacaggtaaccgttgttgtagtataagttaccgatagcgtcatcatctgtagaaacacgttcgttcaataacttctggttgtatacgtcacctttcttcatgcggagcaggaagttcaactgttctgacggatagagagtgttacctacccatgtaacgttacgcagataatatttttgtccctcgtctatattcaaataaacgtttacagtcttttcgtcatactgtgaaacgctgtcttttacaatcattgcatcacggtatcccaactcattatatttgtcgataatcagttgcttgtctgcctcgaagttctctggcacgaatttcttggtgcggaacaggttacgaagtttacctttctcattggttttcttcataactttcttcagcttggaagtcttgattgcatgattaccaacgatttggatttcgtgtactttgattttttctttcttgtcgatatcaatgtcgacgatcacctgattttcgctggatggatcgtctttctgcgagatgattacttctgcatttttgaatcccttatcgtcgaagtaacgtttgattaatgtcttggcacggtctacggtattcggagtaatctgcataccttttaccattcccagcttgctttcaagatcggtacgttccgacttcttcacaccatgatagcgtacatctgcgatacgtgggcgttgtgtcagactgatttttaaccagattttgtcaccttcaattttctcggctgtgatttgtacatttgagaacaagccatgacgccaataacgtttgattgctccagtaatttcgtcacccggcacagtaattgtctgtcctaccgatagtccggatagtccaatcaatacatagtcttcataattctttacgccttcgactttaatatctgctatctcatactttttgggtgttccggagtataagatgacaggtttcgagtcttcatcagtgttagcattttgcgcaaagcctgttgtcgcaaagctgcacaggcagacaaacgttatgaatataaaggaaatacgataatgcatttatgttataatttgatgtttcgagttatattagctgatctgttcactggttttgccgaatcggcgttccctttgttgatattcccaaatggctttgtagaattcttctttgtcgaagtccggccagaaggtatcacaaaaataaagctccgaataagcgcattgccataggaggtaattgcttagccggatttctcctcccgttcggatcagtaaatccggatcgggcataaaattagtatccagatgagatgagatacactcatcggttatttgttcgggagatatttctcccgtttttacttgcgtcgctatttgccgtactgcttcagttatttcccaacgggatgagtaactaagagctagtaccatatacattccactattcttggatgtgcgttttatacatgatgtcaaacttttctgaacttcaacaggcaacttcttgaaatcaccgattacgttgaagcgaatattgttcttcatcagtgtctcttcttcaatagattctagcaatagattcatcaaagccgctatctcgtcttgcggccgattccagttctcggttgagaaggtataaagtgtcaggtacttaatccccagtctggcagcatcttcagtaatcttctgtaccgtttctgcgccagcacggtgaccgtaagtacgttcttcccctcgttgttttgcccatcgtccgttcccatccataatgatggctacgtgttgtggtatccgagttttgtctatttgttctatataggacatcttcttattttaaacgtatacgtttttatttcccggcatgttccggatctttatcaaaccatagctgattcaagcgaccacgccatacttctgaattatgactatatgggcgttttactgtggtagtagctcgtgagctgtcttctttttctacttcttcatcaaagctaacattgtcgtctttgccgaatatgaatactaaataattattggctctgttctgggcatctttttctgtgtccactaccatggaaaagttctttctgcctctaaattcggggaacttaataggatcatatccagtgttctctttagaccaattttgatgagggaatgagaactttttattagctttttcccattcacgtcctgacggtgaagtatagaatgcttcaaatccgtctccaaatagataaaattgagaattataatgaataataatagggttttttagttccgggcaatatctataggttgaaccggcagggagatctccccatccgcttactataatattttctttaataggggtatcattgtcgtccaaaactggctctctgttctcattcaatttgttgacctctcgagattcttcagaatacatccatgcgacagctatcgcaatgtcagtgccatcatttgaaagagtggtagatttttccgcttcaccaattaatagcacaccttgagttccattcctattctcataattggtatatgaggtgattttacttggaaatttttttctggtttctccatcaagatattttttgttgttgtcatatagagcgtattcctcatttactccatcagtactggttgtgaaaatatacttattatcattaacttttttgatataactaatccttgtattcttttcagagtcaaaattctctttgataggcgctaagaacagttcaatattggttaaagaagttagcgcactccaattaataccatcttctgatgtataggcgtatacagtattgttattatctttaaacgttgcatacaacatatctttgaattcgatgatagaggtgggtaatgtttttatagaattctctattcctactatcgaattaggagaccaattgtttaaaccactaagtgtgttcttatatactttaagtcctgatgccgtttctgtatatgttaagacattagaccctaaaataatggatctttgaagaccaattatattattgtcaccagctccttctatatactcccatctcaacgaatccggatcatgctgatgtacatttaccttaatagtatattccttagtttgattaggagatattcccgctaaggcttctgtcgaccatacctttatcttaagtggattccgaagatcgatcgaatcattgatgtttaagacggaatcgtttccgcttttgtccttcattgtaacgacgcctgatgccgttgttaatgttttgattaaaatcttgtcaatgatggtatcggcatgaacaggaagagagtcttcgttataaatttcacgtgataattgatcaatagtgaatttataactcccaaggcctgctgtgtcaagtgcaaacgcatggatagttgcatccggactatattcgatgttattatcgtcatcaagacatgacgttataacaaatgacaccatgaaaaaactcgctatgaatgataaaaactttattctcatttgaaagattgtgtttatttacaagttgcaaaaatagaaacattttttccgataatgaacattacaggtaagttttatataaaattatagataataacactgtttttatcgacgtaaaaccccctgaatagaactattttagctatatccgatgaacataatgccaaaattgtctttcgaagtgttcttctatcgagtaactaaaattatcgttcatttggggtgcttgaacaccggaatgtagtctgctggggcacttctcgatatacgcctcatcccatagctcgtcattaatgaacgattgcagcaattggctgcctccttctaccaataaggattgtattttccgttgatacagtacttccataatctgctccagtgggttatgattgaagtcgatggagatatatgtgatgttggttcttgctggctgtttcttttcagtaaaaactaatgttggtacattcccatcgaatatttgtaaatcattcggaagagataatgtgcggtctaatacgacacgtattggattatgtccataccagttgcgtaccgttagcgacggattatccaataaagctgttcgcctgcctaccataatagcatcggcctccgctctttttttatgtactagcattgaagtgagaggagaggagagtatcaaaggcattccacttgtacgttctatatcaataaaccgatcggctgactctgcccattttaatgtaatataaggccgatgaagtgtattgaaagtaataaaacgacgaatcagtgattgacattcttcctctaatatgccgactgtaacttctcgtccggcatcccgtagtttttgaatcccccgtccggctacttcagaaaaggggtcctggcatccgataacaatgcgtggaatctgtttctctataatcagatccgcacaaggaggtgttttcccgtagtgggagcaaggttccagactgacataaatcgtagaatgtttcaataaagactcatctttgacagaacggattgcattgacttccgcatgtgcctctccgcagcgaatgtgataaccttcgccgataatacgtccgtgacatacgataacagcccctaccatcgggttgggagacacattgcataacccgttctttgcaagctcaatgcaacgcctcatgtatttttcttcttccattttggtgctcttcgccatattattcttacttttgcactccgaaattgtgaaaatatgaatcgtatcaccgcttacattcgccagtctttgcaggaaatctatccaccggaggaggtaaaagccctttcgatgctgatttgttgcgacatgttaggcttagatgcgctcgatatttacatgggcaaagatataattttatccgaatgcaaacagcgtgaattagaaaacattatattccgtttacagaaaaatgaacctatacagtacattcgcggttttgcagagttttgtggaaggaattttaaggttgcttccggcgtattaatccctcgaccggagaccgcggaactcgtggaattaatagtaaaggagaatccgaatgcccgtcatctgttagacataggtacgggaaccggatgtattgcgatctctctggataaagaacttccggatatagaagtagaagcttgggatatttcggaagaagcgttagctattgcccgtaaaaacaatgaagatttggaagccggggtgagatttctgcaaagagatgtattgtccgatgactgggaaaaggtgccgtcttttgatgtgatcgtcagtaatccgccttatgtgaccgaaacggaaaagaacgaaatggacgccaatgtccttgattgggaaccgggactggccctgttcgttcctgacgaggaccctttacggttttataatcgtatagcccgtctgggaagtgaattactcttgccgggtgggaaactttattttgaaatcaaccaggcctatggccgggaaacagcacacatacttgaaatgaaccaatatcgtgatgctcgtgttataaaagacatatttggaaaagatagaatagttacagctaaccgatgagtgcacaattaactgatgaagaggctttaaatcgcgtagcctcttactgctccactgccgagcattgccgggcagaaataaatgagaagttacaacgttggggaattgcctatgataccattgcgcgtattcttgaccgactggaatcagagaagttcattgatgatgaacgtttctgcagggcttttgtgaatgacaagttccgctttgccaagtgggggaaaatgaaaatagcccaggggctttacatgaagaagatcccttctgatgtggcatggcgttatctgaatgaaattgatgaagaagaatacctttctattctgcgtgacctgctggcttccaaacggaaaagtattcatgcggcagacgattatgaattgaatggaaagctgatgcgatttgccatgagtcgtggatttgaactgaaagatattaagcgttgtatcgacattcccgatgaagaggaacaaattgactgaaaaaataaacggattcttctttttattctcgttcaatttctgtacttttgcggcaaataattaatagttagtttagttatgaaaaacttagagagactatttgcggagaaactgttgaagattaaagctattaaacttcaacccgctaacccttttacatgggcttctggatggaaatcccccttttactgtgacaaccgtaaaactctgtcctatccttctcttcgtaattttgtgaagattgaaattacacgtctgatattagaacgattcggacaggtggatgcgattgctggtgtggctacaggcgctattccgcagggagctttggtggctgatgcattgaatttgccgttcgtgtatgttcgttctacccccaaagatcatggattagaaaacctgattgaaggtgaacttcgtccgggtatgaaagtcgtagtcgtagaggacttgatttctactggtggtagtagtttgaaggctgttgaagcaattcgtcgcgatggttgtgaagtgatcggtatggttgcagcgtatacatacggattcccggtagctgaagaggcgttcaaaaatgcgaaggtgactttggtaacgttgaccaattatgaagccgtgcttgatgttgctcttcgtacaggttatatcgaagaagaagacatacagacattgaacgaatggcgtaaagaccctgctcattgggatgctggaaaataagattcattttttgatcaaacatatttggtaaaaagaactgttcgggcaatatttggccggattgttctttttttgttttatactaatagaaaattatgagtaattttgagagtagtgtcaaggtaataccttacagccaggagcgcgtatataataaactttcagatttaagtaatctggaagcagtcaaagaccgtttgccaaaagataaggtgcaggatttgagttttgattcggacacgttgagttttagtgtctctcctatcggaaagttgactttgcaaattgtagagcgtgatccttgtaaatgtataaagttggcaacaactaactctcctcttccttttaatatgtggattcaattggttgaaactgcagaagaagagtgcaaagtgaaggtaactatcggaatggatcttaatccatttatgaaagcaatggtacagaaacctctccaggaaggtttggagaagatggttgatatgctggcagttattggatattaaacttttttttatggcacagaaactttgggagaagtccgtacaggtaaataaggatatcgaacgtttcacggtaggtcgtgatcgtgagatggatctttatttggccaagcatgatgtgcttggttctatggctcatattacgatgcttgaaagcattgggttgttgacaaaagaagaactggaccagttgctggtggaattgaagagtatttatgcctcggccgaaaaaggcgaatttgtgatagaagacggggtggaagatgtacattcacaggtagaattgatgttgacccgtcgtttgggagatatcggaaagaaaatacatagtggccgttccagaaatgatcaggttctgttggacttgaaactttttacccgtacgcaaataaaagaggttgccgaagcggtagaacaactatttcatgtcttgatccgtcagagcgaacggtataaaaacgttttgatgccgggatatacacacctgcagattgcaatgccttcttcttttggattgtggtttggtgcctacgccgagagtcttatggacgatatgctgtttttgcaggcagcatttaaaatgtgcaatcgtaatccattaggttcagcagccggatatggttcgtcttttcctttgaaccgtaccatgacgactgacttattgggttttgattcaatgaattacaatgttgtatatgctcaaatggggcgtggaaagatggaacgcaatgttgcttttgcattggctacgattgccgggacgatttccaaattagcttttgacgcctgtatgtttaacagtcaaaacttcggtttcgtcaagttgcctgatgactgtaccacggggtccagcattatgcctcataagaagaatcccgatgtctttgaactgacacgtgctaaatgtaataaactgcaatcgcttccccaacagatcatgatgattgcgaataatttgccttctggctatttccgtgatttacagattataaaagaagttttcctgcctgcttttcaggaattgaaagactgtttgcagatgacaacttacatcatgaatgaaataaaggtcaacgagcatatccttgacgatgataaatacctccttatttttagcgtggaagaagtgaatcgtttggcacgtgaaggtatgcctttccgtgatgcatataagaaggttggtttggatattgaagcaggtaaattctcgcatactaaagaagtacatcatacacatgaaggtagcattggtaacctttgtaatgcagaaatctctgcactgatgcagcaagtaatcgatggattcaacttttgtggaatggagagagcggagaaagcactgcttggaagataaaatagactttcggaggatagttttttaaactttcctccgaaaagatttggcagaaacaagtaaactacttatctttgcacccgttgaaaaaacgcggaaatagctcagttggtagagcataaccttgccaaggttagggtcgcgagttcgagtctcgttttccgctctttctttgaaaggatgctcgaatggtggaatggtagacacgaaggacttaaaatcctttggccattgcggctgtgcgggttcaagtcccgcttcgagtacgagtattctttataggctttatgaatcattgattcatgaagccttttttatttttatgggtgtgtaatatacatttgttttgtttgagggagctttgtagtaatggctacttgaaaaaaaatcaaaaaacagtaataatatttttttattgtattattaatcttttattttgctttcagattataagtttataatgaattattatattaccgcttctttaaccttatacatggtacatttaatttaaccgttaacgctgaaaaatactagagagatggaaaataacgacaagcagattgaattaaagtttcagaggttttttactgtgaattttccgaaagtaaagaactttgctcaaatgctgcttaaatctgaaagtgatgcagaagatgtggctcaagatgttttctgtaagctttggatgcagccggagttatggctggataatgataaagaactagataattacattttcataatgactagaaatatagttctgaacatctttaaacatcaacaggtagagcaagaatatcagacggaggttatagaaaaaacttttctttatgaattgacagaaaaggaagagatattgaatagtgtgtattataaggagatgctcttaattattcagttgacactagagaagatgccgaagcgtcgtcggttgatattcgaactaagtcgtttcaggggattaagtcataaagaaatagctgataaactcgatgtttctattcgaacaatagagcatcaggtttatttggcattgatcgaattaaagaaggtactcctcttttttattttttttctctgatatttttaagtagtcctcaaatccgcaactacgcgcctaatatgatacagaagcgaaaagaatctgcatcgttagtaaaaagggggcacagtgcatcgaatgtcaccataaagacatataaatgccccttaccccaccatgcgacttgaggcaatacgcaaaatcacgactataagttgtcggtgttatccaaagtcattctggaacacattggcataagcattgttgcatgaatagatattcagcacatacttccttgatgtcctgacccatttggctggcacagagatgaacttaaagacaaacgtcttgatgcggcttgttgctttgagtccgaacctcttcacgtcaagcctcgccatgatgaatttatagaagttgcgtatgagtgccataagcagaagaaacaccgtgttttctcccataaaggattttggaagcctgttccagccgaatccgttattcatatcatcgaagatgcgttccttccctccacggaggttatagaattcgacaatctctttctcggaagactcgtagtcatttgtaaggatgcagcggtaggtgtattctccttcccacaggtcgagttcgccgtctatccgcttctgtctttgaatcacaagacggtatgccttccctttccatttctcgatgagaatggaggccagctcaaactcaatgccgcccaattccactttcttccaacctctgagggcaaagatgtcattgtagagcgaactgcatcggttagcacggatatagaaggtcttgcagtgtttagcaatctcttccactatctcttcagaacacgagccgcaatcagctctgaaacggttgataataagcttgttttgttcaaacctttcaaagaacctcttcagcgtgtccttctggtggaaacggacatttgtgttgccgtcgctgttctcaatgccgacaatcaagttgccaataaccgccacgccagggcgataaccaaggaacttcttgtatgtaggcttcgcatcaaacttctcagcctctatgaactggtggtcgaagtcaacgtcatacccctcgccctctttcagctgccctgtggacaataggcaattgaggagcagtgtattcagcttgtctgccgtgttgaagtcgtaggtcttgccagtgtcggatgtgtaggaaatgttatcctgggtcagttcctttatggctctaagaatcgtgtcggcactgcatgtgcgaagtgtcggatgaagcgaaaggtggtacatcagatgagtggtgacatcctcgatgcatgagccgccacaaaaataaacgctcataagcgaacggatgatttcgctgtattgataaccatacagcctgcatctcataccgagggttgagtcgattacagatgagagtctggagtcaaattgctccattattgaaaatattcctccaaaaggagtgagtttctcggatttaattgctacctttgccatgtctgtcgggtttgatacatattttgatttgcaacactaagataggtgaaaaatctgacatggcaaattcctgagcaactttttgttgctcaggtacttaaaaagttatatttgtaatagtgttgcggaattaagggtagtatgtatgtagtagttgtatttagtgtataaagcccaaaaagaaagaaaaagattcatgaaagattatattcaacaactcatagaattgttcggccataataactattcagccgatacgcataagaaagtgcaacagtggttggctgatgaggagcatgttgatgaaaagagtgaggctcttcgtgagctttggaaacaagcaggagaacagaaagtgcctgatggcatgcaacaatcaatacaacgaatgcggcagaatctgggaatgcagtctatcacttcacgtagaaattaccagttgcttatatggagagctgcagctattttattgttagcagtctcatctgtttctatttatttgatgttggaaaaggaacggccggaaaaagatttagttgaatgctatataccgacagcggaaattcgtgaacttacattaccggatggtacatatgtcatgttgaattcgaagagtatactactatatccggaaaaatttacaggagagactagaagtgtatatttgattggtgaggccaactttaaagtgaaaccggataagaagcatcctttcattgtaaaggccaatgattatcaagttactgctttaggtactgaatttaatgtaaatgcttatccggaaaatagcgaactgatggctactttgctggaaggtagtgtgaaagttgaattcaataacttgctgtccaatattattttaaagcctaatgaacagttggtatatgacaaacatacgaaagcgcacaacctgcggatgccggagatagatgatgtgacggcatggcaacgtggggaattggtttttagtaatatgtatctggaggatatttttacaagtcttgaacgcaaatttccttatgcttttgtatatagccttcatagcttgaaaaagaatacatatagtttccgcttctccaaacaggcgaatctggaggaagttatgaagattatatcgcaagttgttggaaatgtaaactatgttatcaagggaaataagtgttatgtaactagtaaagaatgaatatattgtagaaccttttaaatttaatacgtaatgcaaaaaaatacccggaaggaatggccgttcctcccggatatgaaatcaatctcttttaatattagcgtaatattgacgctattctgaatgatcctagaataataaccaattaactaatactaaagatgctacaaatctacgaaaaaatagcagaaaaaatagctcataagcgggtctttctcacttttttaagtcttattcttatacaccttaattccgcaacactattacaaatataactttttaagtacctgagcaacaaaaagttgctcaggaatttgccatgtcagatttttcacctatcttagtgttgcaaatcaaaatatgtatcaaacccgacagacatggcaaaggtagcaattaaatccgagaaactcactccttttggaggaatattttcaataatggagcaatttgactccagactctcatctgtaatcgactcaaccctcggtatgagatgcaggctgtatggttatcaatacagcgaaatcatccgttcgcttatgagcgtttatttttgtggcggctcatgcatcgaggatgtcaccactcatctgatgtaccacctttcgcttcatccgacacttcgcacatgcagtgccgacacgattcttagagccataaaggaactgacccaggataacatttcctacacatccgacactggcaagacctacgacttcaacacggcagacaagctgaatacactgctcctcaattgcctattgtccacagggcagctgaaagagggcgaggggtatgacgttgacttcgaccaccagttcatagaggctgagaagtttgatgcgaagcctacatacaagaagttccttggttatcgccctggcgtggcggttattggcaacttgattgtcggcattgagaacagcgacggcaacacaaatgtccgtttccaccagaaggacacgctgaagaggttctttgaaaggtttgaacaaaacaagcttattatcaaccgtttcagagctgattgcggctcgtgttctgaagagatagtggaagagattgctaaacactgcaagaccttctatatccgtgctaaccgatgcagttcgctctacaatgacatctttgccctcagaggttggaagaaagtggaattgggcggcattgagtttgagctggcctccattctcatcgagaaatggaaagggaaggcataccgtcttgtgattcaaagacagaagcggatagacggcgaactcgacctgtgggaaggagaatacacctaccgctgcatccttacaaatgactacgagtcttccgagaaagagattgtcgaattctataacctccgtggagggaaggaacgcatcttcgatgatatgaataacggattcggctggaacaggcttccaaaatcctttatgggagaaaacacggtgtttcttctgcttatggcactcatacgcaacttctataaattcatcatggcgaggcttgacgtgaagaggttcggactcaaagcaacaagccgcatcaagacgtttgtctttaagttcatctctgtgccagccaaatgggtcaggacatcaaggaagtatgtgctgaatatctattcatgcaacaatgcttatgccaatgtgttccagaatgactttggataacaccgacaacttatagtcgtgattttgcgtattgcctcaagtcgcatggtggggtaaggggcatttatatgtctttatggtgacattcgatgcactgtgccccctttttactaacgatgcagattcttttcgcttctgtatcatattaggcgcgtagttgcggatttgaggatacagactttcgctttggctcaaaatgatagtaaaataactatccaacaaaagaatattactgtcattgatgccttaaagactgtggaaaaacagtctaaaatgtctataaattatagtgattccgaattgacaggaaaagtaatagcccagttaaatttgcagaacgcatccctcgaaaccgcacttgataccatcttaaaagggacgggcttttcattccaaatacaaggtaactacattataatagctgaaaagaagcctgtagttgcacaaatccttaaaaatatcaaaggaaaggttactgatgagagcggtgaaccgttgattggagtaaatatatctgtggatggtagttctacaggtacgattaccgatttcgatggtaactttacgatcaaggcagcagagaaatctattctcaaagtatcttatatcggatatgctgcacagataattcctgtttccaagaaagatttctatccggttgtaatgaagcaggatacagaagtgctcgatgaagttgttgtaacggcattgggtatcaaacgtgcagaaaaggcgttgtcttacaatgtacaacaagtcaagggagatgcactgactacggtaaaagatgctaacttcgtaaactcgctgaacggtaagatagccggagtgagtattaacaaaagtgctagtggagttggtggtgcgacacgtgttgtaatgcgtggtgcaaaatctatcgaaggtgataacaatgctttgtatgtggtggacggtattcctttgttcaataccaatatgggaaataccgacagtggtattatgggtgaaggtaaggccggaacagaaggaatcgccgacttcaatcccgaagatattgaaagtctttctgttttgagtggtccttcggctgctgcgttgtatggtagtagtgccgctaacggtgtaattttgattaccactaaaaaaggaaaagaaggaaaactttcagtgcagttctcttcttcttcagagttcagcaaagcttatatgactcctgagtttcaaaatacgtatggtaacaaaaaagatatgtatgaaagctggggtgagaaactgttgactcctacaagttatgatcctaagaaggatttctttaataccggaacaaactttattaattcggttacgttgaccaccggtacgaaatcgaatcagacttttgcttctgtttcttctaccaattccaaaggtattgtgcctaataatgaatatgaacgtttgaatttcacaatccgtaatacggcaactttccttaatgataaattacaactcgatttaggtgcgtcgtatgtgaaacagaaagacaagaatatggtatcgcaaggacaatattggaatccggtgatggccgcctatttgttccctcgtggtgaagactttgatggaattaagtcattcgaacatttcgatgaaagtcgccaacttccggttcagtattggccggtggcagatccggtatatgcttcacagaacccttactggactgcttatcgcaatgtagctacgaatgaaaagagtcgttatatgttcaacgtagggttgacttataatattaccgattggttgaatgcgacagcccgtttcagaatggatgacacacatgtattgtttgaacgcaagatttacgcttcatccgacgataaatttgcggaaggaaagaaaggactgtatggatacaataactatgaagaccgtcaggaatatgccgactttatgttgaacgtaaacaaacatatagctgatttcagtatttctgccaatgcgggttggaactattctaactattgggcattggagagaggatacaaagggacattattgggagtgcccaataaatttgcggcttctaatatcgatccggctaatggtcgtatctcagaaaagggtggtgatagtcgtgtacgtaatcatgctgtttttgccaatttggaacttggttggaagagtatgctttatttgacgctgaccggacgtaatgactggaattcacgtttggtgaataccgatgaagaatctttcttctatccctcaatcggtctgtccgggattatttccgagatggtcaaattgcccgaatttatctcttacctgaaagttcgcggttcgtatacggaagtcggtgcgcctgtatcccgttcgggactgactccgggtacggtaactacccctattgtgggtggtgcattagatcctaccggtatctatccgtttactgatttcaaggcagaacgtacaaagtcatacgaatttggattaagtctgaagttgtggaataaattaagtgcggaggtaacctactatcattctaatacatacaatcagactttcttgggtgatcttccggaatttaccggatacaagcagatttatttgcaggccggtaatgtggaaaatcgtggttgggaggcttcattaagctattccgatcagtttaagttcggattaggaatctcttcaacattgacattctctcgtaatataaacgagattaaggagatggttgaaaactatcatacggatttgatggatgaaccgattaatattccggaggttttgaaggatggtggtcgtgtcatcttgaaagaaggcggaagtatccacgatatttatgccaacaccttcttgaagaaagaccacttgggatatgttgaggtaaagagcgacggaacctttggaatggaaaagggggaacccgtttatttgggaaaaacttctcctgatttcaatatgggatggagtaatatgttgacatacaaaggctttgggctcggattccagatcaacggacgttttggaggcgtggtgacctcttctacagaggcattgcttgatcgtttcggtgtatccaaacgttcggctgaggctcgtgaagcgggaggcgtattgttgaagggacaaggtctggtagatgcgaagtcttattatcagatgacaggtacgggaaattatgaaacttccggttactatgtatacagtgccaccaatattcgtttgcaagaacttacctttagctatactatgcctaataagtggtttggtaacgtgttgaaagatgttacagtttcgtttatagccaacaatccttggatgttgtattgcgaagctccgttcgatccggaactgactccttccactagtacttacggacaaggtaatgattattttatgcaaccgagtgttcgtagctttggcttcggtattaaatttaaattataatacaccttctttattatgagaaaaatgaatcattttaaactattagcggtgatatgcgcaatgacgctatttgcctcatgcaattttgaagaaatcaataccaaccaatttgagatgagcgacggagaaggtgcgatggatggttttgaagtcggagggctgattacagctatgcaacggacagtgattcccgtaggcacacaggctgatgatacagatgttatcaatgagtatcaaatagcttatcatctatcggccgataattggagtggattttttggcgagaacaacagtaacggttggaacgcaggtagtaacaatactacttattatttgttggacaattggataaaagcgacctatacacagtcttataccaatgctcttgatccttggaagaaattgaaaatagcgtccgagaaaaatggtacgcccgaagtctttgctttggctcaaattctgaagatttccgcttggcacaagacacttgaaagtttcggtccgatgccttattctcatgcggcggacgctacaatgaacattccgttcgattcggagaaagaggtgtatacggcgatgtttgaagaattgaccgcagccattgaagaattaacagaaaaggcggaaaatggggtgaatgtaatgggcgcttatgatgcggtatatgccggagatgctaccaaatgggtgaaatacggcaattcgctgatgcttcgtttggctatgcgtgtccgcttcgctgatgcggaactggcgaaaaagtttgctactcaagcagtaaatcattctatcggcgtgatgacggctaaggatgatgcggctcaaatgagtcaaggagcaggtatgacttttcgcaacaacattgaatggctggcaggcaactataatgaagctcgtatgggttcttctatcttttcttatctgatgggatatgaagacccgcgtttgaacgtttattttttgccgatggatggtaatgcctcttatggtgttgaggctttcaacggaaaaacatatcaagcggtgccggcagggcatgccaatgcgcagaatgatatctataaatcttgctcaaagcccaatattcaaagtggaactcctacatattggctgcgtgcatcggaagtttattttttgcgtgcggaagcagctttagtgtgggaaggtttcggcagtgcggattcatggtataaacagggcattgatatgtcttttcaggagaatggtgtgaccgaacctgtagacgattatatgaattccaatttgtcacctcgggcatatgttctttcccattatcagtatgggcaaacactttctgctccgtgtgagactactgtcaagtttgaagggacaactgagcagaagttggaaaaaattatgattcagaagtggattgctttgtttcctaacggacaggaagcgtggacggaatggagaagaaccggttatccgaagttgaatgtcattaagactttgaaaggagcagtgcaaggcgcaactcttgagggcggtattcgccgtatgatttatcccaccagtttttctcagactaacgagggaaaggctatttatgaagcagccttgaagttgttcaataacggtgcaggtggcgaagataagtcttctacccgtttgtggtgggattgtaagagataacctacatgtatcattttaatacagatgaagaatatgaaatcattaagaaaattgttatatattattccattgacaggcatgatggtaacttcttgcatggatgtggagaatattgagatagaccatataggcgggtatgccacaatgaacaatgcggagagtgaggcatattatgccaatctgcgcgcctataaggcgactgcttggaattacaatcgtcccgtagctttcggatggtattccaattgggcgcctgctggagcttatcgaagaggatatctctctgctatgcccgatagtatggattttgtttctatgtggagtggcgctccaggacgttatgaaatcactccggagcagaaggcagataaagagtttgtgcaaaaggtgaaaggaacgaaactgttgcaggtaagtctgctttcttatcttggtaagggtgcgacaccaaattcggtatacctcgaagtggaaaaacaagcggaggaagaaggctggtcggcggctcaattggaaacggcgaagaaacaagcccgttggaaatattggggatttgaaggtcagtttgaaagtgaaaaccattatgcatgtctggcgaagtttgccaaagctctgtgtgattctttgtatgcaaacgaatgggacggttatgatgtagactgggaaatcggtagtggtgtgtttgatatggatggcacattgagtcagaataagcatttgattcatttggttaaagagatgaacaattacattggtccgaaaagcgatccggaaggtaaaggacataaaatgatctgtattgatggaaatatttatgggcttacccatgaattggatgagtatgtcgattattggattatacaaagttatggtagttccaatcccggttttgatggttatggcgttgatcctaaaaaaataatctgcacagagaactttgaaaagtatgccactaatggaggtcaattgctgaagcaggctgctgctatgccgcaagaaggttataaaggtggagtaggagcttatcgcttcgataatgattatgacaatacgccaaattataaatggatgcgtcaggctattcaaatcaatcagcgggttttcaatgaatggaaagcgaaacaaaacgaagcggaaaataaaccgcagaaataagtggacttataaaattctaaaacagtaaaaagatgatgaataaacatatattctattatttgatggtaggtagtatggcgttattgttgggcgcttgcaacgacagcatgaatgacctgctggagcctaaggtttatttcgaaagcaaggaatataatttctcggtggaagatgaaatggatgtaatgacatttgatctggtttcaagactctcgtcagcaacttcctctcaggtagacgtatcatatagtgtagccgaaccaagtgtagtagacgaatacaatgcaaagtatggcacaaattatgagatgcttgatgtttcgcaggtaaagctaagcagtacgacatcttctatttcgagtggaaaattgtatgcggataatgtagaagtcgaactttccgggttagaagccttgaaagccgggaactcatatgttttgcctatgcgggtgcattcgtcttcggtgtcgactctttccggaacaaacattgcatatttctttttctccaaaccgttgaaaattaccaaagctggtaatttcagtaatcactatatttctgtgaagttccctgtcggtactttcttctcgtcattcacttacgaagcattgattaatgtggattatttcctcgataataatacgattatgggaaccgaaggtgtgatgattctccgtatcggtgatgcaggaggaggaattactcctaaagattatttggaagtggccggaggacagaactaccgtgtaacgaaaccgttgttaacaaatcgttggtatcatgtagcgttgacttatgatcaaccgacaggaaaaacaggtatttatgtaaatggtgagaaatgggctggttcagattggggtattgacggttttgatccgaattcggacatgggtttttatattggtagaatctatggttttaaatggggtgaacgtccattccatggtaaaatgagtgaagtccgtgtttggagtgtagcccgtacggaaaatcaacttaagcagaatatgctgggtgttgaccctgcttcagaaggcttggcactttattataaactagacggatcagagactcaggaaggtggagttatcaaagatgccacagggcgtataaacggtactacaaatggaattactattaagacgttggatgctccgatagctatcaattaatggaacacacaaatttgtgagagtttttgctctttgcatttttgaatatgagtgaaagcctgcttactgaaaagataatattcttttggtaagcaggtttcttttatttatgtttgttttatgaagaagttactatttatcctgtttatatcttttccatctaaatgtttttgaagcgtggtgaagaacgggaagtgaagtttattttgtccgaagaggatttctcgcttgtcgatcggaatttaaagaggattgtggagccgggaacttttcagataatgattggtgctgcttccgatgacataagattacagacgaaagtagctataaaataggagatgccatctttgactgtttgatatgttttctaaatacattcagtgtgtcggaaattccgacacactgaatgtatttgtagcttgcacctatttttattgtcaaacagttagtataacattcaaataaatgaatatcaatgctctcttgataataacctctgataataggctgataatgaaatatagtctcgatgctatcatttcactccacttggttcgcgctttataattcgatttttagatttgaatgatcatagactatgggaatactttccccattaacagacacagataccgggcattgtaaacttctgatataggctttgactttggtggagccatcaatccatagctgcatgcgtctattttcttctttctgaataataaatagttttgccagcgaggagaaataagaggtagttcctctttttaatgaactgccataaccaataaaatactctttagcatctgccggagcgctcttttccggatatgtaactataaacatataagcatctgtagaccagccatcggcttcaatccatgaattgctatgcattaatcgtccgtctgctaactgattaatataaatatctgtaatcttacccttattgcggatgcgtaaaccaatccagtttttaccttcacgtttctcaatctcaggaagctctttttcatcgggagtctcttttaaaataatagcagtcacacctttcactctattgacttcgtcaggcaagtgaaaagaataataactatctttacttttcaaatcttcagtcggtacttctattacttcccaatacaaatcgtccggataatcatgcacaaaattagatcgtgccaacgtgcgaggatataatggacggactattactgaagaatttccatttgtaatgtttagatctgtcccttttttctcagttattcctcccggatgccacaaccattcaaaatgaccggtttcataggtttttaaatcatcaatgatatagatgacgttgtctatccacaaaaagtgacggaagttgcggctaaactggtccgaataaggacctgtaccatttgccaacacatattttatatttccggcatccaacagataatgcagatatcctcttaaggtagaaccataatattgctgttctcgtctttgccctttgccattgaataatacgacattatgtgcctcgctttgaaagaagtagttgcggtattcgggattcgcataccaacatcgtcctccatctttgataatatcctctcctttatgaaagactatgaatgaattggcatcggcatgagaatgattccaggtatatccggacttgacggctaacattgtggcatctttctcccaagagttgcgcatggttgcccaaccgaagtctttgaataattgtgatttctttagtttaggaaccttgggtgctttactcaaattgggagtatagagaaatcctatcgggcggtcgataaaatatccatcacggtgttgcccttgctctatctgattcatataccaaagcatatcatcattttgaatccccattgcatataataacatcagactactttcggcagccgtgtttttatgactgtccccgaagtttatattataaagcatacctgtacgtggataacagatatgtacaaaaaaatctgataacttctccagttggggtatctctattgctttatcttccttgtgagtattcatccaagctaagcggaataataaagcctcttgaatcccgtagtttgcatagttcagacattcatacattccaccggcctcatcaaaggtctttggcttttgatgaagcacatctcctgcaaactcaaaccattcgggaaggacttcgttgataatctttacagcatctcttgcttcttccaattcattctgtaagcttagtgcaagtagaccacccatacacgtacaagaagtccaccagttgtgccccattgagtttagtgaatgaatacgtgttggctccaagatccagtcacctaatagcgggtccattgccagacgttttaatccgtgagctatttttcttctttcagattgagaaagttcttgatagatggcgtcataagctattgctgcataaaaagctttatgtgcaatctcaaggtcggcgttccaggctggggtacgagccatcatttcttgattgccccaagtttcgtcctcagtgacatccagcaaaatctcttttattttatcagcatacttcttttcatccgtcattagaaatgagagtgctaaatagtctatcttattcaattgagttttctgcaataggttatcggcagttttcctgattgaattccaagcttcagacattcgtgtatcctgtctgacacttatttttgcctgctcaattcgttgaggggtataaagtaaggctggatgctttattttttctgcatggataaaaagtaaatataaagctgctgaaagacataaaagaattcgtttcatattacattttgcataaattggttccttatttaaatgaaatacgaatgaaacgtctatctcgcttaatcatttgtgttttttcgaaaattataatgtatacccttgttgtattgatgtttaatctctatttttgtctggcaaattaggctggcttatgaaaaatacaaagcgtacaagcattatcacactcgttctcctgctaagcatttttaaggtatactcacaatatatgtttcggcattgggatgtggttgatgggatgtcggataatcaaatacgatattttacaatggcaccggatggtcgtatggtcattcgaacagcttctattttaaacatctacaatggtgctacattcgaacatttttatcacgataggcggaaaatctataaatgggatttcaaccggaatcaaatatttaaagattatcacgatgcttacggacggatatggatgaaatctccgggatatttgttattattcgatttgaataccaatcagtttatttatgatattgattccgaattacgccggatgggagtaagtggaaaattgaagaatttgtttattgatgagagcaagaactattggtttcttaccgaagataatacattctatttttttgatatatccgcaggagaattacagataatcgaaaaggggaacagtgactttacatatcggcacggtattccgtacgagttagctcaatataagaatacttattatatcgtatattcgagcgggctgattcgtcgttgggacaaaaccttgcgagattacaccgggcaggatactttttttgtaggacgtatctctgaagctacagaccggttaaaaatacaatctacctccgatgggaatctatggctgatgtataatcaggctgtttgctatcgtgataaaactgataaaggttggcaagagataagcaccattaaaggtatgtccaacttctttacctgtatggatttggacaagcaaggaaacgcatgggtcggttcttcgtggtctggattgcggaaaattgaaaactctacacatagaattgaaacaatgcccggattgaaattaggtgacggcagtgtgttaagtaatgacatacagtgcatctttgccgataataatgacggaatttgggtaggcactttgtggcaaggtatctgttactataatccgagtatgtataagttcaagctaattcagactgttcagaataaaacaatgattaccaacgaatcggtgcgttgtttgttggaagacgaagacggaacgatactcattggtactactgcatacggattgatgcgttactctccttctacgggagaagtcagcagggcattcaaagatattctgtccggtgatctttgtctgactctttatagagacagtaaaaagagattgtgggttggaacgtatttgaatggattttgctgcatagatggaaaaaatgtgagatattacaataaacaattagttaatacagagttattcccggagcagaatatctcccgagctgtttatgaagatccggatgggcgttactgggtcagtgtcagtaatgaaggagtaggtgagctagacacctcaacgggaaaaatacgattgttgcgggataaacatccgaaaattagctttcataaacgcgattatggtttttatcctgtcagcaattctacttttgcggtgtttggggaaaatggtatttactactatgatactcataaagataaaatctttgttcctgaaatagacgatccggataatcctaaatttatggggcctcaggtaagctataattgtgtgtacaaagatagccattcgctagaatggtttgggacggatattggaattcgtgtatgggacgaacaaaagaagaaagctcatacgataactacagaaaccggattggctaacaattctatatcgtcaatcattgaggatgatagcggtatttattgggtatcaacggtaagtggtatctcacggattgaattaaaagagacttctgaaggatatgattttctcatagtcaacttcagttcagaagacggattgcagggaggaaagttctatgagaattcatcgttaaaaacccgtgatggagaactgtattttggcggtcatcatggcattaattcgtttcaacctcaaaagatttattataatcatgtccacaataaacctatattcactgcattccgtctgttcaattctcctgttaaggaacacactgaatataaagggcgtgttattcttgaatatccgataaataatactcgtgagattcatttgaagtataatgagaactttgttactttcgaatttgccgggcttaactatgtgaatactttgcaaacctactataggtataaactcgagaattttgatccggactggaatgaaataaagaccaatggcctgggagtggctacctataccggtttacatccggggaaatataaattggtggtatacacagccaataacgacagaagttggggagaacaggccgctgaaatgactattgtcgtttctccacctttttgggcaactgttcctgcttacatattttacatattgattgcaggcggagtcatctatttgttttttaaagcttataggaagaaaaaacttaaaaagcagttcgaacaagaagccttgaaacgtgaacagcagaaagaagagcttaatcagatgaagttccgctttttcaccaatatcagtcacgaattccgtactccgcttactttgataatgacgcctttaggtatccttattcaacaagcggagaatccaatgaaggacaaattgaagtcaatctataaccatgccggtaatttgttggagttgattaatcaactgcttgattttcggaaactggagatgggaggtgaaagtctgaaattacatcaggctgacatcgtagagtttgtgcggtacattggttcagggtttaaagaactggcggcaaatcgatctataaaattttcgatagagagcgaatgtcctggcatgaatatctggtttgatgatacgaaaatgcaacggattctgaataatatttattccaatgcatttaaattcactcctgatggaggacttatctcaacgattgtagcgacggagaaaaaggacgaaaggatattcgtaagaattgaaatatccgatacgggatgtggaatcagtgaaaaagacctgaatgtgatatttgaccgcttttatcagtcagagccaattcctggtgtgacaggttccggtattggtttgcatatggtcaaagaatatgtctctttgcataacggaaagatagaagtgcatagcaaaataggagtaggaacaacctttttgatatatattccctccgacttgaaaggagacgacagtgaacccaaagctccggctatgttttctgatgtggaagaaaaggtggtacattcggacaggaaaactattttgatagtggaagacaatgtagaattccgtcgttttttggtggaacaattgacaggtcaatttaatattctggaggctggagacggagccgaaggcgaagaagttgccatacataagtcgccggacctgataatatccgatatgatgatgccgaaagtggatggtctggaaatgtgtgtccggattaaaaacaatattcagacctcacatattccgattatcttgctcacggcacgtatttcagacgaagctcggatagaaagttataaagctggtgctgattcttatatatcgaaacctttcaattatgacatattactgacgcgtattaatatgcttttagaacagcaggaaaagcgtaaggaaatatttcataaagaaatagaaatctctcctcagaatatcactattacttctttagatgaagaatttgtggagaaagccttacggttggtggaagagaatatggaaaatccggagttctcggttaataacttgtgtgatgacttggggatgagtcgtagtcagctataccgtaaatttgagtccattaccggattgacaccgaatgattttattcgttctgtccgattgaaacgagctgcccagttgcttcggggcagttcatataatatttcggagatttcggacagggtcggattcaattccattaaatatttcaataaatactttaaagaagagttcggattcactccgacgcaatatcgttcgaatggtagtggagagactaaataaaaagtctctccattcccatttatatactgaaaatgccctaaaaagggtataatgagacaaactaacctaataatcgggacaaattatctcaatggtgtcgattggattcgtctatttttgcagtgtgattaaaaataactatgaactgcaaaatgatggaaccatgaagaatattctatctaaaagaacatttattgtattaccactatttcttttttcacttcatccgctttggggacagaaaagtaactttaaaaatgacatttgtattccgggcaaactgtatatgctttcggatataaggaatgatgtttttgtcgaagcactaattaaaagatggagaccttacaatgactttgtgagattttcgggtgactgcgtttattcgagaaaactgaatcgtgtagcttctgtcgatactcctgtggatggatcgaatatgaaaatcgaattggtcaattcggatgagtttgaaacaataaaagaaaaagcaatctctatatgcgtagggaaaaaaggaataggaactcaggaagttactgttcagatactgggggacagttttgtcaacggagcttttttcagggacgcgttgctgtcgaagaattatattcccggtataaaactggtcggactaaggaatataaagaatgaagaaggacaatatgatgaagggcggggtggatggacagtgaagaaatacttcgagattcctaaaggagagatgacatcatatcatggatatatgcaacctgtgggtgaatatagatattgggggagttgtgagttttggaaaaactgttataaggtgattaatggtgaactgacagatactgaaatagtctataactgtgggagatacgatcaatgcataactaaattcgataaggagacaggttatttggcagctccgaagaaaaacgatttaatgtatgataatgcacgtggaagctacatggtttatacaggaaagaagtggaagaatgttgaggttgatgagagaaaatgggctttcaattatagaaaatatctggatatgtggaatcttgatgcacctaagttctttgcacagatgttggggctcaatgattatcgcgacagtttgacagccgattatcgggaatggaataaaaagattgccgagatgaaagagtcatattacaaagctgtgcccgatggtaaatttataattctgatcccgtgtacaacctgtggttcgctcaacaatatcagaggagattttacgttacggcagaatgcatccatgtggcaactgcgaaaaaatatcattgatacatttgatggtagggaaagtgaaggatactatgtcgttgacataggcattaccattgataatgaaaaagggtacaaccggaatcgtgacggaatacagaccggaaatccccatccatatcctaattatccgacaatgggaattcctcttgctgcctttattcaatattatagagaactttaaaataacaatgatggctaatacttttgatgatatcataacttgctcttataaagagtatcaccagataattctcaattacataacctatcgcatcactcatcgttgtgaggcagaagatttggctcaagatgtatttgtacgtttattggattataaacaaatgcttcgtccggatactgtaaagtatttcttgtttaccattgcccgtaacatcgtaaccgattatttacgcagatactacaaaaaacaagaagtgaataattatatctatgatatgatcccttcttttactaatgaaacagaagagaagattattgccgatgacttgtgtaagacagaacaacggatacttgctgtctttcctgtacaacggcgtacggtgtatgcgttgagccgttatgaagaaaaagatacggaagagatagccaatatgttgaatcttagtcagcgtacggtagattatcatttatttttaggacgtcgtgacatgcgccgatatatgaagaattgcatttaatatgaactgaatcaataaatagaagtgaagccaatgaagaaaaaaagcagaaaaagtaaaatgacgggatgtctgcacatcttgccgagtcttgagaataaaaataataatgtaaaaacctcagatttaatttcatgaaactccgaaagaaaatgctatgtatggtaaagcaggtgaagaagataacaatctttgcttgtttggtgtgtgtggtgtatcccgttgctgggatacaagcggctgtcggtgaacagcagtcggtagcacaaaccctgaagaaaattaaaggaaaagtgattgacgtgttaggtgagccgcttatcggcgtcaatgtgagtgtagtcggacaaacgggtggtacgattaccgacattgatggtaactattcgctagatgttcctgcgggtgctaaattgaaatttagttatatcggttacgaagaccaaataattgatgcaggtgtaaaagcggtactaaatgtgacaatgaaggagagtactgaagtgctcgaagaagtggtagttgtaggatatggcgcacagaagaaagaaacactaacaggtgcggtgaccgtagttagtgacaagatgttaaaggataagggagctctctctaatcctgcacaggctttgcaaggacaagtgccgggagtcattataacccgtaactcggctgctccgggagatgagagctggaatatgaaattacgcggttcattctcgaagaataattcagctccgttggtgattattgatggtgtggagtctgacgatttttcccaattaaatccgggtgatatagagtccatcaatttccttaaagacgcttctgcagctatctatggtagtaaagctgccggaggtgttgttctggtacagactaaaaaggccaaagaaggtaaggtaaaggtggaatatagtggttcggtaactgctaaattcgtagggttgcagcctacactgatgacattggatgagtggtgtgatgctatggaacaagctcgtttgaatgataacaaaaagctggcagacgatcaatggctgcaatacgtagctttggctcgtcagaataagggacattatattaatgtggagcagtcgggtaatcctttcccggattctttccaaggtttatacgacttcgtcttttttgataccgattggcaagatatcatgtgggggacagcagcttccacttcacatgaactgagcgtatcgggtggtaacgaaaggtctgtcttccgtctttccggacgatatatgtatgatgatagtaatttgaaatggggtaacaataagaatcaacgttataattttcgtttgagtaatacattccatcttacaaagaactttgatcttgagtctatcattttctattatcgtcaggatcaagtgtcaccgacgcaaattggagaagctttgacagccggaacgcaacaaccgggttttccttcttccacgatggatgggaaaccttatgcgtggggtaactgggctacgcccaactggcgttgtgaattgggaggagacaacaaactcaacacttccggtatcaatatcagtgagacatttaaatatcgttttgacgagcattttgatgcagtagccactttggggtataacacctctactgccattcgggacgtgaaaaaccaaacagtagattattatgactacactggtacaaaacgggaaacgcgtgtggaacccaggcaagaggatacttattatattaaaacaactgcacgaaccaatctgtatacgttaaatttctatttgaactggaagcggacattcggtagtcataacctcggaatgatgcttggtacgcaatatagcatgaaagaatatgattatactgcaactaaggctttgaatattttaccttcactgaatattatcaacggaataggagagataacattacgcaacacaaagaatgaaggaccttccagatatcaggaagcattgctttcttattttgcacgtttgaactataactataaatccaaatacttgcttgaaggaaatttccgttatgacggttcttctaaatttcagccggagaatcgttgggctttctttggaggtgtatccggaggatggcgtatcagtgaagaagagtttgtgaaagggctgggtgttttcgatgatttgaaactacgtctttcttatggtacagtgggtaatcagggaggtattgatcgatacgatggtgtgcagctatacgatttcaaacagaatggaggtgcattagtggggagtggtttactttcctatgtggatacaaacggtaagctgttgagtacagaccgtacatgggaagtcatcaagaactacaatatcggtttggatttcggtttcctggataatcgactgacaggtactgccgaacttttttggaagaagtgtaacaatatgttgattgatgtcacctatcctggaacattgggggataaagctcctaccgctaatagaggtagttttaaggcaaacggttgggaaggcacgattaactggtcggataaaataggagaaatttcctatcatctgggggggactttcacctataccactaacaaattggtagataatgggggtgacgctgtgattaaatccggtgtagtttcaaatcgtgaaggctatccgttgaattccgtgttcggtttgaaatattgcggtaagatacaaacgcaagatcagttggataaatatattaatcaatatgccaatggcaataacaatattgctatgcctggtaacttgcgtttgggagataatatgtatgaagatgtcaataaagatggtaaattgacagaagctgactatgtatatttgggaactgacgatccgaaggtgtctttctcttttaatgccggattatcgtggaaaggcttcgatgtctcggttattttccaaggagccggtaaacgcacagtatggcgtggtggcgaaaataatcaaaagggaaagaatgacaattggcggataccgatgatgtcttggtataataattcaacgaatcagtcggttggtaatgtatggtcggcagaaacgccgaacgcccattatcccacttacacacatcagacacagatcaatctgtataactatatttgttcttcctggtcagtggaagatggtgcttatcttcgtctgaagaatgttacgttaggctacacgtttccggcaaatgtgctttcgaagactaaattcataagctatgcccgtatttatgtatcgggagctgatttgtgggagaatagtaaaatcaaggatggatgggatccggaagcgtcgcgcaaagtagagacatttggccgctatccttttacgagaaacctgacggtaggattaaacttgaccttttaaatattaaatagtatgagattaaataaaataaaaaatctgtttgtcgttttaaccttgggactgtccacacactcttgccttgatctcgagccgcaagaacagttggcggaaacgaactactggaacacaccggatgactatctgctatttgccaatcaattctatggctggacacgtcacttttcaggagcaatggaatataagtcgacaaaaccggtacattctgattatacttcagatctgtttaccaataaagatgaacgtaatttatttagcaatggaagcaatgctgtacagcctgcggatgctaactataccagcaattactcgcacatccgccgtacgaatctgttattgaaaaatgcagagtcatatgccactccgagtgacatagcccagtatgtgggtgaagcaaaattctttcgtgcttattcttatttcgatttattgcaactatatggcaatgctattttggtgaaggaacctatggaggtaactgatgcgcgaatgtatgtcaagcagaatgatcgtagtgaagtggctgatttcatcattaaagatttgaaagaagccgttcctctgttaccgaagttctccgaaatacaagagtatgggcgcataagtcgggaaggatgtcaggcattcttgtcacgagtggcgttgtacgaaggtacctggcaaaaaagtcgtggtaacgtagaacgtggaaaagaactgctggatattgcggcgaaagctgccaaagacgtgatcgatagcaaaacattcagtttgttcaaaccggaagcattgggtgacagtgcacagaaatatatgttcatcttggaggatgcgaagtctaatcctgccggattacagaaaagtgctaataaagaatatatatttgctcggcgctttgatgaaatattggcacctatcaactggaatattacacaaagttcattatataatgcaatatggattagtcgtaaattcgccaatatgtatctttgtcaaaatggacttcccatcacttatggaggaaaaacaaaccctcaattcaaagggtatatgaaaatagatgatgaatttcaggatcgtgacaatcgtatgcgttatacaatgatgcgtcctcacgataacttttggaacaatcagaaaccacgtacttcttgggatggaaaggataagaacccatatatatctaattttgtgccgaagacggggaccggatatcacaatcagaaatgggcaacagagcgtaaggtggaagataaaaaagaaggttatgattttcctataatccgttatgctgaagttttgttgaattatgcagaggcagtgtatgaacgggacgacaagatctcgaatactgacctgaatatttccttgaatttggtgcgtctccgtgttaatccggctatgactccattgactaatgaactgattacccaaaatgcgggtatggatatgcggacagaaatccgccgtgagcgtaccattgaactattcaatgaaggcttccgcttagatgacctgaaacgttggaagacagcagaaacagaaatgccgatggatattgtaggaattcagtggaaaggtacggagtatgaaaaagtgtgggcgaattgtccttatgagaccaatgctgaaggttgtatcattattgaaaaggggcgtaaatgggaagaaaagaactatctgttcccgttgccgagtgaccagttgcagttgaatcctaatttgcaacagaatcccggatgggaataataataaaaacaaataattgtaagtgacatgaaaaacagatattcattgtttaagaaaggatattgggaggctggtgtattacttggcttatgtctgttaatagcttcctgcggagagaaggaatttactactgacatgcccgagaacaagttgattacagctatttcattggaagtgagtagtgaactgcctgtgcagttgggaacagatacaactattgtctatcatattactcccgaaaatgcggatcatacagagttgaagtggacgactactaacgaattggtagctacagtatcacaagatggaacgatttctgctaaatcgttgggaaaaacgatgattaccgtaactccatcggtaggatttggaacagcatccactgtacggactatcgaggtaacagtgattccggaagtaatcaagactaccgggattcagtttacaaacgttgaggaaggagtttacgaaactgataaattacagttgaaatatgatatattgcctgctgaccatacttattcttatttgacttgggcaagtagcaatgaaaatattgcgacggtagataagaatggagtagtgacggggataaaagccggagatgtgactatctatgcatatacgcacgatggcagtaatgtaagaggagaatattcattgaaagtgatgaaatatgaacctgcgacgaatgttgagattgttcctcatacggatgttctctactggaaacagcaacttgatttagactttacgctaacaccggaagtagctactgtaagttctgtggaatggacatcaagcgatgagaaggtattgactgtggaaggaggaaaagtgaaagccatgggcttcggagcagccactgttactgccacttgtatagagactggcaataaatcgactatcgacttgactgtagcctcaggtttttatgtatgggatgccacaacagactttgagggatgggctatcaatagtaatattggctctatggagcgtaaagacggaaaactggttatgaccgtgactgctgataataataagcgcgtgtatatgcaaagagtctatagtacggtagctaatcagatggatatgaattttaaagattatccggtgattgccatgaaatgcacagatataccatcgggtgcacaatatactcttaatcttgctaacttgggaaataccataaatatcgcaccggctatgaaagttgagaaattgtcagatggtacacaactggtttattatgacgcatcttccttagcacagtttaccaatacagaaggggtcgttccgattagagcctttatgttcaagatattaaaagtcgatattccttcattctcggcagactggatacgtacatttaagagtgtagaagaaatgatgacgttttcagaggttgaggctgggaaataatatggacttatattcaccttatagttaaatgattatgaagatagattatataaagaatcagataaaggtagcaggcatggtgattgcctgcacctcactatgctcgtgtaacagtgaaatagaagatgggacgaccgatatagatagttggccgttgcctcgcatagaagtgacctaccctacggaatttgaacacccgggagttgtttttactgtagaagacatcgagcgttttcgtaagattgctacccaacagatacaaccacaatatgcgggttatgaattattgagcgcggataaactctctcaaagtacatatataatgaatggtccttatgatgaaatttatgccggtgaagatgcttctcatccgaacatcatgaatcaatttggaaacgattttgcggcagcttgtcagaatgccattatgtttgctgctacacaacaaaaaggctatgctgataagtcaatggagataatacgtggctattccgccagccttaaaaagcctgtctatagtgcgagacaagccggtttggatcatgtattgatggtgggtaacttatgcataaaactagtttatgctgttgagcttatgcgatatcttgatggttccgggatgacgaatgaggactttcagggagcatgtgatatgtttaagcggtgttttattcccgtattagatgatttcttctctatcacagagcctaagaataaggcagtcggtaactttggcgcatctgccattaactgttacatggccatggcgattgtattggatgatatggaaatgtataagaaagctatagatatttatctttacggatatgaaaatggttctatacgttattatatagatggagaaactggacaatgtcaggaaagtggtcgtgaccaaacacatgcacagttgggattaggtatgatgtccatgctttgtgagacggcctggaaacaaggtactgatctctacggtgtgttagacaaccgcttgctgaaaggctatgaatatacagctaaatataatttagggtatgatgtgccattcaagtatatgccggaactcaccgggaagtataattggtatgaaatagacgaagtagacaagaaagaggtagccagtggtcagagacctgaatcaagacgtggtaaatttgctcctgtctatgagcgggtgtacaatcattatgcgacacgtttaggattgggaatgccttatgtgaaagaagtcttagaaacaaaggttcgtcctgaaaacgccggtactgatattgctcatttggggtatgggacttttctgtattgtagcgaaggttttgaatagtagtttatgaaaagactgttttttatattcatttctttctgcatggcggcggctctgtccgcccaattgcaggaaagaatggttaaagtgaatgttgtacctgatcatgtcgattggaagtacgaactgggtgagaaggtgaaattcaacgttgtggtgacaaagaatcgtgtacctcaagaaaatgtgactgtatggtatgaagttgctcaggatatgatgcatccgttactcaaagataccattgtcttggaaaatggtgtgctgacattggatgccggaaccatgaaaactcctggctttttgcgttgtcgtgtctggacaaaatatgacggtagaactgttgaaggacgggctacggctgcctttgaacctgagaagataaaaccgacagctgttttgccaaacgatttcaatactttctgggaaaatgccaaacaggagaatgttcgaattcctatgaatgcgaaattgcgtttactgcccgaacgttgtaccgagaaggtgaatgtttatgaatggaatgtacagaactaccgtttgaacagccgggtatatggtattctttgtgtgccggtaaagcccgggaagtatcctgctttattgcgggtaccgggggcgggagtacggggatatgccggtgcaattgtagaagcggaaaaaggtatgattacgttggaaattggcattcatggtattccggtaacattagaaccgtccgtttatgctagtttgagccagggaggtctttatcgatatcaatatcagaattgggacaatcgtgatgaagtttattataaacgcgtctatatgggatgtgtacgtgcggtagattatctttgttctatgaaagaatttgatggcagcaacctcttggtgcagggaggtagtcagggaggtgcgttagccatcgtcacggcggttcttaatccgcgtgtgacaggagtcgttagcttctttccggcacttagcgatttgagcggctatgagaaaggacgggcaggtggatggccgcatttattcagagattccaccgatgctgtcgaaatcagaaagaagaaattggaagtatcttcttattatgatgtggctaatttcgcaaagcagctgaaagtcccggtcttcttctatttaggatataacgacatggtatgtcctcctacttccacattttctgtatataacgtaattacttcccctaaagagattgtgataatggaggaagccgagcactatgcttatccggaacattggtcacaggctttgcaatggatttattctaaacagggaatgtgagaggggctcttatgattcgtatgttactactcatataagatttgtacctgttttattgtcatactgtcagggatacactcaagtagatgaatatcagcactctgtcacctgacaataaccattgataataggctgataataaaatatcccgacttttattgtcagccttacttttatctcttataatacctttataacctgataaacagtacctttataagtatgcttcgaaggaatgccgcatttttgcagcaatctcccgaagtgatatactttgttatcggacaatgaaataccgctttttttcttcagaaaattcaagatttcgactggagtaagaaattccccttcctctttcgtttgcgcagtcttgaaatactgataaaacaattgcaacatagctggtgtttgctcaaactcacggttattttcagtcataatctgctcatcttcactgtcaaaccagtatcgttcaccatgataaatctcgtgtatggcttgtgcataaagctgttcataatctatcggctgtgtagtgtcgatgtttcctgtcacttcaatacaaatgaaacggcggcttcccgaaggatcagtcaacaaatccttctgattgcttgtaccgataaatgaagcataccgctgcaattcaagtaccgagcgaccgtgcggtttccgtagattgaccacaggcttttgaagaatatgtttcagaaatccctgttgtggcagggtaatctggtcaaactcatcgatgttgatgagcgcaaatcgattcagatacagttctgcgtcccgtttttggctgaaatcaatactgtctgtatagtaagcgcgaagtgcaggtggaatcatttcacgacagaaagttgatttatgagttccctggcggcccactaatatgggtgacgtattgttcgcgtgcattttatctacccctctccaatgtgaaaccatattcaggaaccaacggtggaaaagtaattcccaatgcggatttttgcaaggaaccctgtttgccaaagcatgaatacggtctttgccgtcccaatgaggcagatgaaacaggaactcttccaacggattgtagattggcacacggttggaatgtaagtatcggtctatgtccctgtcccatacgccaataccttcggattgggcatcaagcatgatactgttttgtgcccgtttgtcaataggatgaaaataaaactgaaacgagaaacgctcccgatattccacttccccgatctgcgtattataacggaactcataacgacggttcataaattcatccatttgcaggctaagacgttgctctttagtcaggcagctgcttttgggcactcccttacattccttatatacgtttcttatcatttcgcgtaccagcatcggattttttcttttgtaataacgcgtgatggttcgtcgggttacctcctcttccgggatgccagagtagtaacaattttcggcaagcgggactactaatgtttgcaaatcatgatcgtttcgatgccagtccgtttccatttcttcgaatgttttccgcaatgccgcttcataaagcaatgctaccgtatcttccgtgtcataccccggcagtgctcgattcagcggagatgcttcagtgctcgatttctcatgataagtcatctcgccgggcataccgatgggctgtgaaagatagaaaggtacgggagcgggacgataaatcaagtccggatcataactaagacgtgagaattgttccagtttcggctcttttaatagaatgttgaagggaagttgaggctgataacatttaatggcaagccggtaagcatgtgcctgaaacacttcggcttcttccgttgtttgcggtaaagtgccgtccggacgggtgaagcaagtccatatcttgacgcttttaccacttgctcccataaaagccagcattgtttggggaagttcggcagccttttgcttcacgatttccacttctgtctttccggctagcggaccgatggtcagttctacaatgccattgtaggttttcattcgcttcactccgttcactcgcccgaaggctgctgcgggaatcactcgtggtagtttgctggcgagggaacaaggctcatcgggtagaacaaaatgcagggcctgacgtaatccggttaccgggcggagcttagtttcttttttcattttttctatcagcaggtcgatgtctgttacgcttagtgcctccgtatctccgttttccctgatttgtgtaatcttcatttttcttctcttgatatttaatgagagtaagtgtttgttattggtttcaaaggtacggataaggtatctgtaaagcaaactatttgcgctttatcgcgataaagaatgtgctttcttgttatactctattcaagaaggcggacttgaaacattaacaagcaagtaaagatatgctcgccactgtgtattgttgcataaagacaccgttattcttacgttaacttaccgcagggaaaacgcattatactctttccttaatcttttatacatttatcttacaccaatattgtcttttcatcttattaataagatatttatctttcatttacaatattatttgagtacatttacgtgattataaatcacaattaaaatgaagcaagaaactaaaagaaagattgagatcagcaacctacatgaatttgctgattcattaatattgatagataaccggatagaccgttgtaaaaaacatcaggccagtaccattgttcttattgcaatttctgctgttatatgtggcgctgatacttggaattcaatagaagactttggtaaaagtaaagaatctttttttgcagccaagctttccaattttaatggtatcccttcccatgatacatttaatcgctttttctcggcattagatcctttaaaatttgaagaatcttataggcaatgggtccaaagcattctcaaatgttattcggggcatatagccattgatggtaaaaccatacgaggagcctatgaatccgaacaggacaagcgtcatcgtaaacaaggagtgcttcctgattcgaatacgggaaagtacaaattgcatgtcatcagtgcatttgcaacagaactgggaatctcccttggacagttatgtacacaagaaaaggaaaatgagatagttgtcattcctgaattattagatatgttgtgtataaaagattgtattattacaattgacgctttaggatgccagcgtacaattgcagagaaagtcataaagggagaaggtgactacatttttatagtgaaagataatcaaccgaaattaaaggaaatagtactgtcagtaacagaaagtattgtatcaaaaggtacaacagtacgatttgacaaatatgagacgcatgaagaaggacatggcaggaatgagtcgagaatctgctattgctgcaacgatcctggtttcctgggagcagatattagaaagaagtggaaaaatatacagtctttcggatatatagagaataccagaaatacaaacaaaggcactacagtggaaaaaagatgttttatatcttccttggaacctgatgcgcagaagatacttaaaaatagtagagaacactgggaaattgagaataatctacattggcagctagatgtcaatttccatgaagataataccagaagaagaaatatatcagcattaaacttctccgtactggcgaaaattgcattggctacattaagaaacaacaaaagagagataccaatcaatagaaaaagattaatagcagggtgggataatgaattcttatgggaacttattttacatgatttataatgcgttttccctgtaacttaccggtattggtagttcgccacggccgtgacgagatcttcccacggccgtggtaggaattcgtcacggctgtggaaagaagtaaccacggccgtgggaaggtaaagataccggtactttagcagaacaatactgctgctttagcagaacaatactgctgctttagccgaacaatgctgctgctttaacggaacaatactgttactttagcagaacaatacctgcttctttagtgaaagataccggatgtgcagtactcatttaactactcatttaacggggcgacattcgcttcgtagcgagtttatatttcttataggctctttgctaatattgaacttcctctctttcaatacaaaacttcctgtatttatttccgtatttccactttgtttcgaaaaaaaagcatatctttgtcatacgctttctgttcaccagcgtgatgaaacaggtaagaagcgttttttatttataaataggaatattattgcattatccctcgtatttgaaatctagcaagtttctgtccgtagagggggggcaacagatattccacgtgaacggtcgtatgtcaacatatcgatgaaagatgtgttatatatacacaattagcgtggatgtctgttgttatcattatctttcggacgggtttgctaggcctcaaatacggataatgattcaacagcattcacgctttttttgtatccggttggtttcataacccttaaaaatccccaaccccaatctcctgtccgcccggaatacaaaaagcgcgaatgtttgttgaatcaacatcaacagagcactatttattccttgttgtataacaaattaaaaacaaacactatgtcacaatggattagcatagaagcggcagccgagaaataccgactcgaaaaagagtatatctggctctgggtggaaatgaaaaaaatcacagtgtcttatgagaacgatacagtttccatagatgatgatagtatccagcaattcataaaacggactaagctgggaattacgtctgaatatatcgatgaattagagcaactttgcatggaaaaaaacaaaaccagcagattgtatgcttcactcttgaatatgcgggatcaggaattaatggcaattagaggccaaagttcgcgactggacggtttatggaaaatggtggaggaacaatacgaaagactgcgatccttcgagaagaattctatgtcggacaacgctatttgtagcaactgctggatcagaaagatatgcaggagattgaaacgaattctataattctgctgtgaatttaatctattaaataacaggctgacaataaaagtacgatctttttattgtcagctattgtcatagcttattgtcagggtgcaatgagttgctagtcaccgtattatccagccaaaactcctgctgacaataagaaccctccaatttatatgtaaacctaaaacctatgaaacttttctgttattaattacacgcatggccgcagtatagtattcgcaaggaacagaaatcaaaatactgtttaaaccattgtctttcgttgacacttgaatataagctgcattcaataaactctttacgctggctacctcccaaggactaccagcaaaaactttgacttgagaaatctttctacttgtaatcatgatctttatagtgtgtttttgtttttactgcgacaaagataagagagaaaagcaacatagaggtgcaatattgtttcatatatagtatacaaatgattcattgaatcaggatttgtattaattgaccagttttttgcgttaataagagttgttttctctcacatcattcatttcttattttgcgtatttgttattgtttctacaaggctattgatataaacctctatattatcataggcagtacttagatttcttccgtttgcatcatatttgtttgggttcaatccgttggcggtttcccattcgtcaggcatgccgtcattgtcagaatcagtaatttgtggcaatgattttaatgttggccatgcgctccagtcgctaccagctccggaaggctttaggtctttctgactatcgataagtccgcccttaggataattctgacttttccaatggatgatacctttgtcgcaatgttcacaaggaccgttcgggcagggggcatctcctaatccgttgtgttcgttctttccgatgaattgtgccgttcctgtgcgtgtctcttcaacgatacgagtatctatatcatctcgtttgagactgcaacccgcatatttcaacaccagctcgtaagctttttgtgctgtgtgggtagttaccgcatctacttctaccggagtatcccgtttcagttcatcgagagagtgaccggtgttgttacggataccagtccagttgtctttgttcacttttgcggcggatgcttctgtcagttggtttcctgcctcgaagtaattccggctgatatgatactgtcccaatacccctttgatcggtgcaaaatctccatcagaagagctgatgtcgatagccatcacacggttggccactttggcatccgtagcgggtccgggtttgtagtagttgtccacaatgttaatacccattgctgcgccgccataacatccgttaccgctccagttataaataacattattacgcatatcagtacgttcctgaccttgatattttactccggaaccgaaacgtggtgtgcgactgtcatggtgtgccatcagattatgatgataggaagcgttgactcctccccaaataccgccatatccatgagggcctttggtatgtcccgataagcggagactttctgaaataatacaccattgcatagtaaagttagtattatcatagaatgaagcacattcgtcagtgctccaactgatggaacaatggtcaatcatgatattgtttttctggcgtcctcccagagcatctgcaccgtcggaagccgaagagcccagtaaatccgtatctcccattcggaaacgcaggtatcgtagaattacattatcggccgatacatttactggaaagtgagccaggcagataccgtctccgggagctgtctggccggctatcgtgacatcaccgttccgaatgtccagtgttgattttagataaatggtgccggatatacagaagataattatacgaggctccttttgttcgatggcataccggagggtacccggtgctttggagtcttccagggatctgacaatatatacctttccacctcttcctcctgtagtgttcattcctcctccttcagctccgggaaaggcatatgctgtttcttctactggtggagatacggagggagaatccggtggagtctcctgttctttattatcttcattgactgaagatgtggaacaggaggagaacgattctacttgtgtggcaaacagtagtgccacgaaaatgaattttaccttgttgtttttcatatcttacctgattttttataaaatgtgatgatagtgatactgatacaaatgtaagtggatagaatttgatagacaactggttgcatagatagtgcaccagattgcacaaaaagtccgcaacttttgaatgatattaaaaaagtccacgcaaacaaacaaatagtgagaaagtattcatgttgttccgtatacttttgtaacgtgaaatagtaactgctcaaggcaggacgaccaaataataatggaataagaatctatcattaagaatataacaaataatttatgaaagcacatttattttcaaagatgtcccaaggactattgttgttatcagctttgctggcaacaagttgcaaggaaagtagcaataacttttttgttcccgaccatgaagccccttctttggtgtctgtaactcctgcaaatggtgaaacggccgaagaaaacaatacgattctgcttacttttaacgagtatgtgaaagcgggagaagggaaagcgaattttaatggcgaggaagtggagttgactttcaaaggtaaaacagcgtcttacgcttatactgctttggactataatcaggcctgtcagttcagcctccccaaaggtgcagtcatagactttcagggaaatgtattcgaaggtgtcagtattcagtttacaatcagagaacgtcctcaaccggaagcacgcatatttgatgcggtggtcagtcctgacggaaaaggaaactataccagtatacagaaagcaatagataatgtcccctcgaaaagaacagaaccctggctcattttcgtggcgaacggaacgtatgaagaacaaattattattcctgaagacaaaccgtatattcatctcatcggacaggatgtggataagacaattgtcaagttacgaattaacagctcaaccgaagccagtgcgactgatccggatgtgtggaagtactcttataagaacttaggaaaaacggaagccgctatggtatcagtgaaagctacggatttttacgtagagaatatatcttttgtaaacggatatggcaaagaattacagaaaggtcctatggcattggcaatgtatacccagaatgaccgcaactcattcaataattgcaaattcctctcgtaccaagacacttggcagaccgggcctaaatcggataacggcagactgtatgcacagaattgctggattgaaggagccgttgattacttctatggaaacgggaattgctttctcgaacattgcaccttttataatatgagggatggcgcaattattgttgctccttctcataaagtaggaacacgttggggatatgtgttgaataattgcattgtggatggaaatgaattggctgatacagaaagtgtcaagttggggcgtccctggcataattctccgatagctgtatatctcaatacgatttttaatataaagatagctccggaaggatggacggatatgggagctattcctcagatgtttgctgaatataacagtaaggataaggaggggaatgctgtagatttaagccagcgtaaaacgcaatatacctatcaggatgaacaagagaatccggtgacaggcatttgtcaggctgtccttacggcaggtgaagcagctcggtatacgtatgaaaacgttgttcgtgagggcgataattgggacccgaagaaatatatggaacaaatatccgcaccggaaaatctgaaaagagaaaacggaatattaagttgggatgcttcaaaatatgcaatttgttatttggtaattgcgaacgatgaaactgtacaaataaccaaggaaacgtcttgtaatgttgaggaaggaaagacatatcaggtgaaggccgttagtgagtatgggtctttgagtgaaccttcaaaagagtgatgacaattaaaactttaaaatatgaaaatgataagtaaagtattcagttgtatgttggctttttcttctctgttggggaatgtggaaggacaaaacatctatagaatatggtatgacaaacccgcttcttattgggaagaagcactcccggttggtaatggacggattgcagcaatggtgttcggtgaccctcaactggaacaaatacagttgaacgaagaaacagtgtcggcgggctctccttaccagaactataatgaagaagcaaaaacggctttgccggaaatgcgccggttgatttttgaaggaaagtacgaagaagcgcagaacatggcggcaacgaagattctttcacaagtggggaatgaaatgccttaccagacagtgggtcgtctgaatatccgttatcaagatcacaaaaaggtaaataattactatcgtgatctggatataagcaatgcagtagctgtggctcgctacgaagtagacggagtggaatttaccgaagaaacatttgcatcatttaccgatcaactggttatcaggcatatcaaagcatccaaaccgggaacaatcaattgcgaactgttttttaataccccgatgagagatccgaaacgtagtatttatggaaagaaaggtttgcggctggaaggtattacacatggcagccgttattttccgggtaaagtgcactattgtgccgatttggatgtgaaacataaaggtgggaaagtgataactgccaatgacacgttgcttagcgttcaaggagccagtgaacttacattgtatatctcgatggcgactaactttgtcaactataaagatatatcgggcgatccgtatcaacggaataaagcttatttgaaaaatgcagcgaaagattatagtaaagcgaaagccgctcatattgctgcttatcagaaacaattcaatcgtgtaactttggatttgggtgaaacttcccaagccaataagccgatggatgtacgtatcaaggaattttcttcatcctatgatccggcattgatagcattgtatttccagtatggacgttacttattgatttcatcttcacagcccggatgccagcccgccaacttgcagggcaaatggaatcataacccgggacctccctggagctgcaattatacaacgaatattaatgctgaaatgaattactggccggcggaaatcactaacttggccgaacttcataaaccattcatccagatggtacgtgaattgagcgagaatgggcgtgaagctgccagtcgaatgtatggttgtcgtggctgggtgttgcatcataatacggatttgtggcgtatgacgggtgcggtggaccgtccttattgtgggacatggcctgtggctaatgcatggctttgccagcatttatgggaccgttatttgttttccggtgataagaagtatttggaggaagtatatccgatgatgaaaagtgcttcggaattctttgtcgactttctggtacgcgacccgaacacgggttatctggttgtcactccttccaactcacccgagaattctccgcgctggataaagaagaaaagtaatctttttgcaggaatcacaatggataatcagttggtttttgatttattttcaaatacatgcgaagctgccaaagtgctgaacgcagatactgatttttgtgatacattgaagaatatgcgccggcagttgcctccgatgcaggtagggcagtacggacaattgcaggaatggtttgaagactgggatcatcctaatgatcgtcaccggcacatctctcatctttgggggctatatcccggttatcagatttctccttatcgttctccggtactctttgaagcggcaaaaaacacattgatacaacggggagatccttctaccggttggtcaatgggatggaaagtttgtttctgggcccgtatgcttgacggggaccatgcttatcagttgataaagaatcagctgacttatgtcagccctgaaatacaaaaaggacagggaggcggaacgtatcctaatttattcgacgcgcatccacctttccaaatagatggtaacttcggttgcacggctggtattgccgaaatgctggtgcaaagtcatgatggtgcgattcatctgttgccttcgttgccttcggaatggaagagcgggacagtgaaagggttgcgtgcccggggaggttttttgattgatgaattgatctggaaggacggtaagctggtaaaagctgtgttacgttcggaaaccggaggtaatctgcgcctgcgctcttactggaaattggctgctgaaggagcattgttgaaacagaagaaggaagaggaagcgaatccgaacgcattatttaaagtacagcaaatctcacgcccgatgattagtgaaaaagcgcctttaaaaggagtggcattacgtgatacttatttgtatgatgtggatacacgcgaaggagaggtgattattgttacagtaaaataagacattctatataaaaagtccacgcttttgcataaataatgagtggaaaacagatgtaaaagtgtgacttttgtaacatcaaaaatgaaacaaattaatcaagataatactatggatgtacaaagacatttatttttgagaagatgctttgcgtatatatgttgcttgctcttgtgctttataacggcgacaacagtatatgcacagaaggtatctgtgaaaggaacggtggtggataccaacggcgatgctattattggtgctagtgtgaaggtgttgaaaaagtcttccgtcggtacaattaccgacttggatggaaatttcactttgtctgttcccgaagatgcaacaaagttggaaattagttttgtaggaatgaaatcagttgttgcgactgtgaaaccgggcaaacatctgaaagttgtgttggaagaagacaatcagactttggacgaagtggtagtggtagggtacggaacctcacgccgcggagatttgaccggtgcgatttcttcagtgagtgagaaggttttgaaggatattccgataacttctgcggctgcggctattacaggaaaactggcaggtgtgaatgtagtggctactgatggatcgcccgatgcaacaatccagattacagtacgtggtggtggttctattacccaggacaattcaccgttatatattgttgacggttttcaggtgagtaatatcaatgatattcctcccggtgatattcaaagcattgatgttttgaaagatgcttcttctaccgccatctatggagctaaaggtgcgaacggcgttattcttgttactacaaaaagcggtaaggcgggaaaaacagaaatctcattcaatgctcactggggtgtcagtaatgtgtataatctgacgggggtactttcaccttacgaatactactgttatcagaaagaacttgatccgggcacctctctgaccagtagcattaattcgatgtatggacgttgggacgaccgcaatatttatcgttcggtagaaggcacgaactggcaggataaagtatatggaaacaccggattcaaacaaagctataacgttggtataacaggaggaacggatgccacattgcgttataatttgagttatacgcgggatgatgagaagtacattatgctcaactccaattatgtgagggataacttgagtgtgaagatggataaaaagttgagtaacaaattgaagtttgagttttccagccgtttgactagaatggtgattgacggtgcgggtaccaatggaggtaaattgagagatgccgttcttttctcgccaatcaacagccttgcaagtatagatgcgggagatgctttggggggtgaaattgattactcggatgatgcattgttatcatcattgaatgatcctgtatataatacggtgaatgagtataagaagcaaaaccagttttctatgacttataatgccggctttaactgggaaattgttaaaggattgacttatcagctgaaaggtagttacgcctacacttataattataccgataatgtctggttaaagaaaaccggagagtcgagctccaatgccggtcagcccgtagccaaacgtacggatgagaaaggtgcacgatggaacttgcagaacatattgagttaccggttctctctgaaaaagaatcaccgtcttgatctgatggccggacatgaaatggtgagtaattacagaaatcagatgattgcctcatccaaatattatcctatggattttacggcgagcgaagtgttggctatgtggaactatggagaatcccaaccaacgtataccactcttggtgaaccttctcgtacggcatcttacttcggtcgtttaaactatgctttcaaagaccggtacatgttcacttttacagcccgtgccgacggaacgaatgtgttcgctcctgaaaatcgttggggatttttcccgggtatggcattggcatggcgcatttcccaggaaaaatttatgaagcagacggaagactggctggataatctgaaacttcgtgtgagttacgggtcagttggtaatgcgcgtgtcaattcatactggagacaggattataaaatggaatcttctgccaataggcaatattatctgaatgaaacagtacagagtgccctgaaattgcagaacaccttgcggaacgagaatctgacttgggagacgaagttatcctctaatgtgggaatagatgccagcctctttaatagccgtttgaatgtgacggttgacttctataatgatataacgaaagatttaatcttacgcatggatcttccttcaaattcgggatatgaatatcagtatcagaatgtaggccgcagtacgaacaggggagttgaacttacgcttagcggaacgattatcaatagtaaagatttctatctgggcgctaacttcaatatatcattcaataaaaatatagtgaataaactggatggaacggcaaccgtattgagtgcgcaatccaactggcgaccggatatcggctctgatgattttcgtgctattgtaggtcaggcggtaggacagatttatggtttcgaagtagagggcttttattctgtagacgactttacgtttgatgagaatacgaaaaaatggatactgaatgaaggggtagtagacgacagggctttgttctctaatgacctgcctaactttggtcctggctttatcaaactgaaggatcagaataatgacggtgtgatcgatgcggataatgaccgtaaagtgatcggtagtgtacagccaaagcatattggcggattcgggctgaatgctgcatggagagggtttgacttggcggcaatgttcaactggtcatatggcaataaagtatataatgccaataagattatggcatccactcatacgaatcgtaaatataataatatcagagattttatgagtttggaaaaccgttggtcgattattgatccggaaacgggtgccaatgtaatgtatggtaatgacgccaatccggaacgctttgttgaaatcaattccaaagcctctatctggatgcctatgatgggacgtacgcttgtgacggactgggcgattgaagacggctcttttttgcgttgtagtaacctgacgttagggtatacgcttccggttactgtgactcgtaagctaggagtcaagaacctgcgcgtgtatgctacggccaataacctgttttgctggacagcttattccggacaggatcctgaagtgagcacacaacgttctacccctttgactccgggtgtggattattctgcatatccgaaagcacattcttatgtattcggtcttaatgttactttttaatacttgaaaaatgaaaatacagaaactatttttagcggttttatcctcctctgtgttatgcacttcgtgtatggataattttttggataccgaaagtccttctattccaagtgatgagaatctgtttaaatcgacagctctgacggaagcagccttgatgggtgtatatgcgacaatgacggacacctatatatatggtcagaaactgtgtgtcaactggcagggagcttctgacgtggaggttggctcgggtgcgttttctacggaaaactataattcgacacttcgtgatgaaggtgctggcaatttttatgacgataattataaccggaataccagatgggacaaactttattatctggcagaatccgccactactatcgtagatggtatacgtcggtcaccgttgatgcaatctacttcggacaaggctgccatgcgtagatatttaggagaggcattagcactaaaagcgttaggctattttgaattgatccgttattggggagatgtgccatataaagagcatgcgtctgaaagcggattgggaaatgtctatataggaaaagtggatcgtgatattgtttataattatatcatagaggatttgaaagaggcaattgaatatctgccttggatgggagaagaatcatatacggtagaacgcatgaataaaggttttgccaaaggactgctggcaaaggtagcgctatttgctggaggatggtctgtacgggatggaaatcagtttccggacttggatgtggaacatcatccgaccattccggaaatgaacggatatttcgtcggtcgccctaagaattggaaagattattatgagctggctgccaaacagtgtgcggagattttgggagcgactgataatcctcatgagcttgatcccagttatgagaatatttggtctactgtcaatcatctggaatacaacaagtataatgaaaacctgtttgaagtcgcttttggtgaaggacagaatggagatgtgggggccacgatgggatacaacctgaacagaggggtttttaataccacccaaggtatgggaggggcaggatatgcggctactactgcttactatttttattcatttgatccggcagacacccgtcgggatgttacttgtgttttccaggaatatatcaatgagaatggaaaaaataaggaagttattcgctgtaatccattaggagtggcttgtggtaaatggcgttggtattggatgactgataattatatgaaagtccgtttcccgaaagctaattcacgtattgctactggtatcaactggattttgatgcggtattcagatatttacctgatgtttgcggaggctcaaaatgtattgacagggccggatgcagttagtccgattgccggtatgtctccccgacaggctttggaaaaggttcgtgaaagagcatttggtactggtgctcccgaaatcacgcagtatgacgcggatttcttcacggctattgtcaatgaacgggcatgggagtttggttgtgaatctattcgtcgtcaggatttgacacgttggggattgttggcggagaaaatagaagagatgaaaataggtctttgtatgttgtatgactacaagccggtgactattttcgggaagacttatcaagtggatgaaataccgagaaaaatctattataaatatgaagactctgataatccggaatacattgatatgtcgtctgttaacttcaatgaggatatgggaaccggtactgcttctacatcaaaaggacagtatgagtgcaactggatcagtatgcaggtgacattgaataaggatggtgatataaatgcaaccctgaatactaattatgtgaaaacaatggctagaatattggtttgcggtacagggctgaatgcgtcttacgactattcgaatttgtttggcaggctgaactggggcggtgaagccgaagcggagttccgtaaatattctgttggtaatggagtgtgtaattatcgccatgtattcgctatttattatgaggatgtcaataagacgcaagggtatgtttctaattcgtatggttataaataattaatggtaggaaaagatgaaaagactagttaatagattatccggagcatgcctgtatgtactattggctttgatagtgggtatgtcttcctgtgaggacgatgccaatgactggacagttaataagaactatgatgctttgttccgtccgttgacgttcgataagtcggctaccgatgcgacttcggttacattaagatattcgcagattgtgaatgcaaaagtctatatttttgagttttatacggacagcttggagtttaatgcggaaaattatgtaaggacagatacgattctgaaagatacattgactgtattttcagagagtaatacgcctatgagggtggaatatcgtactttgtttcaggagttcaacggttctacgcaatattctgttcgtatgaaaggagaagatgcgcagggaaaggcaagcacttatgtcagtgtagcatttaaaactccggatgagcaattatttaccggagtggaagttacagctaattccgcaaccttgacatgggaagaaacgaacagggtaactcatctgacgttggctcaaatggtggatacgaaatatggtgaggaaaaacagattgatttgacttcggaagatatagcggcttgttcaaaaacactctccgaattggagaatggagcgacctatcgtgttcggatttataataatgatgcattacgtggttcgtatgtattcaagacacagggattgggtggtagcgaaatcctttttgtggaggctacggaaaccggagtcattgatttaagtacattgttatctaatttagtgaaagagaaagaatgtagcaatgtaactgtccaacttactccgggggcggtgtataaggtaagtgaactaaagattccgggattggataatattttgtttaccagtacggaagctaatgaaaataatcgtccacagcttattgtgactaataaaatatcattggcttctccgatacagtctctgtcattcgagtttgtttgcctgaatggaaatggcgaggccagttatatgacggattggaaaaatagttcttatgcccagtctatttcattcacaggctgtgctatacagaacataaaacgtacgcttgttcgtattagcgatggaagtggtgtgttcatgacggatattacgattgataactgtgtcatatccgaagttggtacggacggatatggaatgattaatttcggaaaaaatatcgatcagttggaaaaggtttctataacgaatagtacattgattaatattggtgaccagttgatggacgtgaaagggggaatcggtgatgtgatattggaaaattgtactttctataattctatggatgctaagaaggaattgcctaaagttttccgtttcgataatgcggcaagtactccgccttctccgaaatctgcgacaatgcggaatttgattttctccggtccgaacaaaggaaagaaaatgaatagtggaaatggtgcttatgacattttgaacttctctgataattgttatatcacctccgacctgcaggaaggcaataacaggtttgaagaaataacgagaataaaacaaagctcggatgacttgttcgttgatccattaaacggtgatttccatattaaaccgggagccgggttcgccggaacgggtaatgctggtgatccacgttggtattaattgatcctataattgttaggtataaagaatatcatgaagaatattgtattatcaattttattgatgagtgcctgtgcaatgatttatgcacaggcggactcatcgccttatcaggctattgtagctgttgatggtagtggagattataaaacggttcaggaagcaatcaatgctgtacctgacggacagacgaaaccttggttgattctgataaagaatggtttgtataatgagcaggtgattatccctaagaataagccatacgtacatttaataggccaggataaggataagaccattattcatttaaacttgaatgttggtagtaaactgaccggtaaagaaataggtggaaaaacagcttattgggaacactcggttcataatccttcctctccagtttataaatacgagggatcggtagtggtggtaaaaggagaccacttttatacggaaaacatttcgtatgtgaatgactggggagttttatcagataatggtccgcaggctttggctatgaatagtcaggcagattgtgcttccttttataattgtaagttccgttcttttcaagatacttggatgactgccaataatgatgtcagtcggcactatgtgaaagattgctggatagaaggcgcggtagactatttttatggtggtggtgatgtgttgctggaaaactgtacgctttataatgtacggagtggagcagtaatagtggctccttcccataaagatgctaaatatggttatgcttttcgtaattgcactatagatggaaacagtgaagcggctgacggacgtttgaagttggggcgtccatggcataataattcgaagacggtgtatatcaataccatcatgcttatccctgtcgctgatgaaggatggacgaatatgggaacggttcccgggatttttgccgaatacaatagtcgtgatgcacagggtaatgtgttggatttaagtaaacgcaaaacggaatatcaatataaagaccgccaaaccggtaaggaagtatcgggtacctgtcaggcaactataacgaaagaggaggcggacaaatatacgtacgaaaatatgattccgggtaatgatggctggaatccgcgtattatgatggagaaattaggaagtccgcgcagtctggtttatcagcaaggcactcttaaatggaatcctgtgaaaaatgcgatcggatatattgtatatgatggagaacagattctcgggacgactactgatacctcttttccggtgtcggaagtgaattatgctttgaaggtatctgccgtgaatcaatatggaacgcaaggtaaaaaaggtgtattgtaattgaatatagaaaactggtaaggaaaggggaggtgcttatgaggcatctccctttctttctttatattctgtaggagtgactcccatgatttttttgaagcgcctgctaaagtacttcgggtcattgaaaccggtcatataagcaatttgggagaaactgtattcacttttttcaattagctgggcggctcgtttgatgcgcatttcacatacgaaatctaccggagtcagcccaacaatggattttaattttcggtagaataccgtacggcttaacattagtttgttggcgaagtcgtcgatggtgatatctgtattatccatttgttcctccataaacgccattacttgttgcatgaattgttcatcgtatggagtcacttgaggttgtgaaggctcccacccatttatatgatcctcttcttgagtatgctctgacagtttcgataaatatagatcttgtagctgtttacgctgacggagcagcgacaagattctggtttttaagtatgtagagctgaatggtttggtaatgtagtcatcgataccttgttccagtcctgctatccgatcatctaaagaagattttgctgatagtaatataataggaatatggcaggtgtcatgatcggctttgattgctttcaccatgtctaatccatccatgaccggcatcataacatcactgattatcagatccggaatgtactgctgtgcatattttaatccttcttttccatttgttgcttcgagaacagtgtaagtctctgacaggatattccataggaaatgacgtaattcattgttgtcttcgacaataagaatggaagttttttcatcctctgcgtcggttttattttcattctctgcgtatgctgccttgaaggatgtactatccgaatcttcttcagtagcttgtatcgtcggtgaattattgtcactgtcggataaaataaattcggcttgttgatcgtctgcaaatgctttttcttccttaggaagtgtgacaatgaattcacttccacttcccggctcgcttttcacttggatatttccgtgatgtaattctattaattcgcgtaccagtgaaagcccaatgccggatgagggctgcaggatattgtattgtgccagtgtttcaaatcgataaaatagggattgttgcttttcgggagcaatgccaatgccttcatcagatacagagatggtgacttgctccgaacctgttatcatatttaccgttactttcttcccgttcggtgtatatttgaaggcatttgaaagtagattgaagaatatcttttcaaatttgtcacggtctacccatgcgtatattttgtctgtattagtttgaagttggaaatcaattctcttttcttttgctataaggtggaagctttccattatcttctgtaattgggatacgagttctgtcttttctaccaacactttcatcttcttattttggattttgcggaaatccagtagttgattaaccagacgaagcatacgttctgtgtttttatgtaccaaatttagatgttcccgaactgtcggagagattgtttcatgcgctagaatttctgatacagggctggatattaaagttaaaggagtgcgtaattcatgtgaaatatcagtgaagaagcgtaatttgatattggataaatgttgttccaagtcaacctgatgccgcaaacggtagatatagaacagaatgtatacaatgatggtagtgaataacacgaacatgacaatatagaataaccatgcccagtatgtttcccaaaaagtgggtaaaacatgaatggggagagtgcgtatattatcggtccatactccgtcgctattgctggaacggatttgcagttgatattctccggcaggtaaatttatgtatgttgcagagcggttattaccggcttcgttccattcttcttccaggccttgcagacgataggcgtattcgatggcatcgggatttacataatcaatggctgcaaattgaaaggtgacattacgttccgaaggatttagttccagttcttttatgtcatcaagcgctacatgaagttgacttccttgtattttgagtccggtaaatacaataggaggtacataagaactttttttcatttgttctgtgttgatttcaagtatcccttgattggttccgagaacgattttcttttgactggttagtgtgggaactgcttcagtgagattcagttctctctgaaagtaattacttccataattctcaaatgttccttgttgtggattgaatttggatatggagttttcggagattacccataattgtttttgagtatcttcgagcattgaaagtaccaaatcggaagctaatccgtctttgattgtataacttttgaattgtatatcttccgtgagcagatttttagagataacctggctgattcctccggtgaatgttattacataagtgttttttcgactgtcagtaaatatctgcatgacatcattactgctaaggctggaatctacattagggatacggttgctgtgatagaacttaatttcttcaggctgatcgaacttattggagaatgtaagtaaaccattggttgtgccaatcaataacactccgttgggggcttctgcgatatgtcttattttgagtgaagtagaaacaggatagtttttcagccggttgccgctatggataaagttggtagaaccatcaggtgcgtgtgataataggttgaggccacctccataacatgcgatccatatattgtcatgactatcctgaataatactatagacactattgttgcttaaactgtatgtatcttgtggctgatggacgaattgttgtaaaagataggagtgctcatttttcttctttagaaggatgaggccgtcttttttggttcccatccatatatttccttgtttatcttccataaaacagtacacactttttccgaaagtaacctcttgaggggtgattatgccctgtggagaaaggtagccttctaatgtcccatccggacggtaaattctgacgtttccctttttggaagcaacccagagacgtttctgtttgtcggcaagaaaagcacgtatttccaatccattgtctatgggacgtattttgtatttattgggatagaaagatattttgtctacgccccggtcattggtaatccatacattctgttgccggtcggtataataatagcgaatagagggggcaaatagggaagcgggattattttcatctgcaaagtatagtttcagttgattactgtcgcggtcataatagcacaaatgccctttttgaggactcatccatagtgtgccttcatggtcttcaaagatcatgtaccggttgtcgcgttcatattggattaggttttgtataggagctgtgaagtgctgcttatctcctgttttcagatttagctttatcacaccggaggtattggcaaagatccagacttctccggttttgtcctgataaaagaaatgagcttcattggatggctgggtggctgtttgtatattaaaatgttggaattttttcttttctgtatcgtatgttataaatccgttgtcagttcctaagccgatcttgtcattagaaggggaaatggaagatatggaatagatatctgtgacaggacatggtagctcctggaattttatatttccgttcttgggatcatatattgcgatttttccggaagttgagataagatatattctcttattatattctttgaccattttgaacggataatcgctgttgattcgttttttcccgatgatggttactcccttatctgtcatgatccattcgtccccgtcggaatcttcgtaaatgtcgaatatcttgtttccttttaaattttggttgaaactgctgtataaaatgatatcttttccttctttgcaggtttgctcattgattctgaaagcataaccttgttcgcaggtgatccatgtaatccctttatttaaggtatagatattgctgactgtgttggtctgttgcagggatgattcaataggaaggagtatgtcaataaacttctctgtctgaatatcaaatagatatgcacggttatcataagatttgcaccatatatctccgtctttgctttctgtaatataagagaaacggttagtcgttaaagtacagccgtctcccggaaatgctttgtaatttttaaatgtgtatccgtcaaatttgtttagtccattccaggtggcgaaccaaagaaatccttttttgtcttgcattatattcactactactccttgcgaaaggccactattgacagagaagtgtttaatctggcaaagaggttgagctgctacagtcagactggtgtataagcataaaaggaaaacatagagtgtcttcatgatattataaattatgtgtagagcaaaaatagataaaactggattaaaaaggaaatataaaaccgtgattgaacataaaatgcacgcttttgcatatttaatccacctgtctatcctctatcaagcacaattattaccctataaggagagaagatacctcgtacttttgttttgacaattagaactggtaaaattttaaatgaaaactataaatgaaacgtctatttatttgtgtagtgggacttgttatagccgtaaccgcatggtctcgtacctttaatatgaaggagcttggagctgatccccgaggtattgaatcttgtacggagttaataaaccaaacgattgaaaaagcatcttctgaaggtggaggaactatttatttcccggcaggtgtttatttgacagccactatccacatgaaaagtaatataactttgtatgtggagtccggagctgttcttcgtttttcagatcgttttgaagattatcttccttttgtgaagattcgttgggaaggtacagtgatgaatactttgtctcccctgatttatgcgcatgatgcggagaatttgactataaccgggcgtggaacgttggacggtaatggattcaaatggtggagctgggagaaagaaacacgggagctgattaaaaagaacggaggaaaattgcctgctttgaataaactacaacgaatgtgggaagaggctaatgaagatctggaaatttcggattattataaaccttctttagagcgtcgtatgtttcggcctccttttattcagttttatgaatgtaacaatgtgttgatagagaatgtgaaaattgtcaattctcctttttggaccataaatccggctttttgtgataatgtaacagtgcatggagtgacgatatataacccttcaaaagacccaaaaggtcccaatacggatggaataaacccttcttcttgccggaatgtgcgtatttctgattgttttattagtgtgggggatgattgtattacaattaaatcggggcgtgatgctgatggacggaaatatggaaaggcatgtgaaaatataacgataactaattgtgttatgctttccggtcatggaggggtagttattggtagtgaaatgtcaggcggtgtaaggagagtgacaatttctaattgtgttttcgatggtacggattccggtattcgcttgaaatcttctcgtgggagaggaggagttgttgaagagcttcgggtagataatatcgtcatgaagaatattcagcggaatgccttcatctttgatttgttctatgataaagaatcaaaagtggaacctgtcagtgaacggactcctgttttccggaacattcatttgagtaatatcacaggttctgatatcaagcaaattggttatattaaagggattgaagaaatgcctgtacaaggtttgtccttttcaaatattaatatgaaggcagaggctggatttatagttgatattgctgaagatattcgttttgataatgtggatttctcttcgcagactggttcaccgtggcaattcagtaagtgtaagcagattgttctgaataatgttagatcgaagtatcctgtaaaccaacaaccgattgttacttttgaagatgtcgataatgctattattaataattgttttcagatgactcctgtgaaggatttttataaagctaataacagtcatattattgaaggacataattattggaaaaaagagagttttaaataaacaggaactatcatattatttctgttgaattttattgttgggtagatatgagaagaacgatattacatcatctgtaatatcgttcttctattgattagagttgtttataatttacttcttatcgttttcgcgaatctccacccggcggatcttaccgctgattgtcttaggtagctcttctacgaactcgatcacacgcggatatttataaggagcagtcactttcttcacgtggttctgcaattccttaatcagttcttctccggcacgtgctttatagtctttggatagaacaatcgtagcttttaccacctggccacgaatctcgtcgggtactccggtaatggcacattccacaacagccggatgagtcatcaatgcactttccacttcgaatggaccgatgcggtagccagagctcttgataacgtcgtctgcacgaccaacgaaccaaaggtaaccgtcttcgtctttccaggcaacgtcaccggtataataaataccatcgtgccaagcttcgtgagtacgttccgcatcccggtagtattctttgaaaagtccgagaggtttgcctttgctggtgcggattacaatttgtccttgctcaccggcttcaacagagcgaccttcatggtcaatcaaatctacatcatattgaggattcggcagccccatgcttcccggtttcggttccatccacggcatagtggcgatggtaagggttgtttctgtttgtccgaaaccttccatcagtttgatacctgtcagtttcttgaatgtttcaaatacggcagggtttaatgcttctccggcaatggtgcagtatttgagtgaagataaatcgaattttgtcaggtcttcgtgaatcaggaaccggaagatggtaggaggtgcacagagagaggtgacatgatattcctggattttttccagaatagctgccggggtaaacttctcgtggtcgtagacgaagatattggctccggcaatccactgtccgtagagttttccccatactgcttttccccagccggtatcggcaatggtgaggtgaagactgttctcgttcaggttgtgccaaaaactaccggtaacgatatgacctaacggataagtaaagtcatgtgccaccatcttaggttcgccggtagtgccggaagtaaaatacatcagagagatgtcgtcgttagtgttcgcatggcgtggacgtacaaacggagcggcattttcgatgccctgatggaaatcttcgaaaccttccggtatttccggtccgacactgaccaacttttctacagtgggacactcggggagagcatctttgatatgttgcaggatgattccttcaccggcagctacgatcattttgatatcggcagcgttgcagcgatagataatatcttttttggtcagcaagtgggtggccggaatgacggttgctcccagtttgtgaagggcgatggtgctataccagaactcataacggcgtttcagaatcagcatcaccatgtccccacgaccgatacccagactttggaagtaagaagcggtcatatctgtgtaacgcttcatttcggcaaatgaaaattggcggctttcacctttgtcatttgtccaaagtaaagccttcttgtcgggttgttcggctgcccaggcatctactacgtcataaccgaagttgaagttctccgggacgtttattttcaaattcttgttgaagtcctcttgtgagctgaaagaggtctgtgataaaaatctttctaccatgatgttgttacataattactgccagaaaacgtaccgttttgccatcgagcgctttcatgccatgtggaagtttagagttaaaataaatactgtctccttgattgaggatgatttctttgccttcgatgttgataagcatacgtccttcgatgacaaggttgaattcctgtccattatgtttgttataatggatcggctcgtcgattgctttcggttcaacggtaacgatgaacggatcggcggtacggttcatgaatcctgaagccagtgactggtatttataagctttggtacgttcgatgctgatacctttgccggcacgagtcacaaagtagctgctcattttaggttcttcgccaaacatcagagcgtcgagggctacattatacgtacgggctattttttgtaacatgctgacagagatgtcgtaatctcctgtttccgcaagccggtattcttcagcagaaatgtcactatcgcgggcgatatcctctgcggtcagttccaatacatcacgtaatccgcggaggcgttctgctatctgtttaatttgttcattcatacaaatggttagtattttatgattaataattctatggtgttatttggaagctttcatggctttgataatagcagaggtgaagccgttgtgttctaattcattgatacccttgatggtgattccgcccggagtggttactttgtcgatttctacgctggggtgggtgtcgttgttctgaatcagtgcggccgctccttttaaggattgggctatcatctgcatggcatctttagggcggagtcccatttcgattccggcttgcatggctgcctgaatgtatttcagtacgtaagcgataccgcaggatgccaatgcggtggctgccgctattttatcttcggggataagcatcactgttcccatctcgctaaataaccggaggatgaagttgtcttgttcatcattcgtgttgcgcgcggcaacaagcgtcatgctttcctgttcgctgatagcggtgttcggaatcagacggaacatgggcatttccggtgctacgacataatgagccagttcttcaaaactgatgccggcagctacggagatgagtatctgtttgctttttaatttcaactcgcgcatcaccgattccataaaccacggtttgacggcaaggatgacaatgtctgctcttgtggctgcttccagattattgttggtggtggagatacccggaaattcttttttcagtttctctagttttccggcactgggattggatacaatgatatccgaatcgtctatcagacttccttttgccaggccacgggctattgaaccgcccatgtttcctgcaccgataatggctattttcatatacgcttgtttttaatgagttgttacagacaaaggtaacagttaattacgaaaaaacaaaaagcagccagaataagaaataaatttctaataaaggctgcttttatcgttggctgtttattaatcaaatgagcggttagagtacttttttgaaccgggcgaggaactctttcgcttcctccatgctgagacagagaggaggtaacaggcgaagtacattcgtgccgcttgctccggtaaatacatgctcgtcatagatgagacggctgcgtagttccttgatcggttcttcaaattcgaggccgatcattagtccgcgtccgcgcacttctttgatttgcgggaattttttcagctcttccagtaagtaatcacctactgccttagcattttctaccagattttcctgttcaatgacatccatcacagcgagagctgccgaacatgccaggtgatttcctccaaaagtagttcccaactggccatataccggtttaaacatcgggctgattaagacacctgccattggaaagccgttaccgattcctttggctacagtgataatatccggcttaatgtcattatattgatgagcgaagaatttaccgctacgcccgtatccgctctgaatttcatcgagaatcaggatcgttcctgtttcgctgcaagctttgcggagttcctgcataaattcggtggttggtatcttgataccgcctaccccttgtattccttcaatgataacagcacatgtgtctcctttagacaattcctgtttcatcgcttcaatatcgttgagcgggagataggtgacatgaccgttattgttgataggagcgataatggaaggattgtgagtcgcttctaccgccagagacgtccgtccgtgaaacgccttattgaaagatacgattttggtacgtccgttatagaaggaagccagcttcaaagcgttttcgttcgcttcggctccactgttaatcaggaacaggctgtagtcttcgtaaccggaaatcttgcccagtcgttcggctacctcttgttggagcttgttgatgacggagtttgagtagaaaccaagtttagccacctggttacttatcattgctgtatagtgagggtgtgcatgtccgatagagataacggcatgacctccgtagagatccagatattccgttccgttctcatcccatactttgcaaccgtcgcccttgacaatgttgatgttatataaaggatatacgtcgaataatttcataattctttgtttttaaaaagctgaaggcttcaaacgtagtcctacggtttcttccagattgaacattaggttcatgttatgaaccgcttgtccgctggcgcctttcagcaaattgtcgatacaagagataatcaatagtttgtcaccatgtttttccagatgtatcaggcatttattagtattaacgacttgtttcaagtcaatattcttgtctacgatgtgtacaaaggagtcttttgcataatattcctcatacatacgaacgatttcttccagcgctactttggttttgactaccagcgttgcaaagataccacgggcgaaatcgccacggtatggaatgaagtcgatctccgcatcgaaactgttttgcagctgtttcagtgattgcttgatttccggaacatgctggtgctcgaatgctttgtacacactcatattgttgtttctccaactgaaatgactggtagcacccggtttcactccggctcccgtacttcctgtaatggcatttaccattacatcatccgtcagcatcagattcttggcaagcggaagcaaaccgagctggatgcaggttgcaaaacagccgggattggctacgtgctttgccgtacaagtggcacggcggttcagttccggcaggccgtagataaagtcgtggtcgtcgctcataatacggtagtccatcgagaggtcgataatcttcaggtcttccggtatgttgtgactttccatgaatttctttgtatcgccgtgggcagtgcagaaaaagagaacgtcgattttgtccagaggtaactggtcggtgaatcttagatctgtttctccatacaagccttcgtgtacgtcggtaattctgtttccggcattactgctgctgttgataaatacgatttcagtttccggatggttgagcagcagacggattaattcgcctgctgtatatcctgcgccaccaatgattcctgctttaatcatatctcttcgtctttgtggttattatagtaaacacgtagcggagtagaagtgactttgataaagcctttggcgtcttcggctgtccagcctttctgcatttcaccgtattctccgaatttagtcttcaccagatcatcttccgattctacacctacggtagagaaggagagagggcgaagctcgaggatagccgtaccgtttacgttacgctggctttcctgcaacatcgcttcgatgtcacgcatcaccggttcgaggtattggctttcgtggaggaacataccgtaccagttggctacctggtctttccagtattgttgccatttgctcaatgtatatttctcaaggaagcgatgggcgccgataatcaacatcggagcagctgcttcgaatcctacacggcctttgataccgataattgtatcacctacgtgcatatcacggccgataccgtatgctgcaccaatttcttccactttctggatggctttgatcgggtcgtcaaacttctcgtcgttgacagctttcagttcccctttttcgaaagtcaggcggagctgttcgctgccttctttttcaacatgtttgaggtaggctgtttccgggagtccttgcgcggagtcgaggatttcgccaccacagatagaagtaccccacaaacctacattataagagtatttcagtttggtgaagtccgcgctgaaaccatgtttgttcagataatcaatttcttcctgacggctcaatgccatgtcacgggtcaatgtgatgatttctacattgggagccagtacgaggaaagtcatgtcgaaacggatctggtcattgcctgctccggtagaaccgtgtgcgatggcatccgcaccgatttcgttggcatagcgtgcgatagccaatgcctggaaaatacgttcggaactaacagaaataggataagtaccgttacgcagcacatttccgaaaaccatgtatttcaggctcttttcgtagtattcctgggttacgtccagcgtcacgtatttcactgctcccagtttataagcattttcttcgtttgttttcagttgttcttcgctgaaaccacccgtattggcacaagctgcatatacttcgtaacctttttctttggcgaggtacatgacggtgaacgatgtgtccagtccgccgctgaatgccaccactacttttttcttcttttcttccatagtgctgtatcttttaaatgttatttctttcttgttcctttttgatgttccgcggctctgtcggatcgtacagcatggctgtgcagatgcagaacttgcggtttttcgctaccagaatatcatggttgatacatccttcgcatcctttccagaaagcttcgtcgtctgtcagttcgttgaaggtgacaggcacataacccagttcggtgttcatcttcatgacggctgctccggaggtcagactgaatatttttgctttcggccatcggagacgtgccagttggaaagaagcttgtttaatacgttttgccagtcctaatccacggaaatcgggatgaacgatcagaccggaagtagccacgtactgcttgtttccccatgattcgatgtaggtgaatccggcaaaagtatcgccacaaagagcaataatcgccttaccttctttcatctttgtcgctacgtattcgtgtgtacgttccgcaattcctgttcctcgtacggcggcagcatttctgatagtttccaaaatagtgtcaacgtaaacctcatgtgaggcgtcggctaccataacatctatttgttgagtgtccatttctttattatataataataggtataattattcgatattgggaatgatgagtgacagaagctgacgtattttgctgatggcaactccttcacgcaacaccaacatgattgtatcgtcaccggcaatggttcccagaatttcactgaattcattgttgtcgatgtcatacgccatgctgctcgcataaccgggacgggtgcggataacggcaatgttaccggaaaactgtaaagagataaatccgttgttacgtaacatttcaccggcactctggtcggtagaacgtttatacataatgttgttcggcagtacatatacgtacttcccgttcatactggcagccttggctactttcaattgtttcaagtcgcgggagagggtggcttgtgtcagttcgaagccttcgcggttcagctcttgcaacagttcttcctgcgaaccgacctccttgcttgagataatcattttgatggcgtctaaccgatttgctttcttcttcattgtataattattctaagaatggcgcaaaagtatgcattatttcggagaaaatgtgcataaaaccaaagtttttttgcataaaagtgaaaaatatgctaaacggtgagagtctgcttttttgttttgtgtcaaaatgtataccctttcaatcaaaatacataaggaaagggaggagggaatcgcctatctttgccatgtaggtaaatggataccttaaatatatagacagaataccatgaaacaaaacttttttgcagtcgacctgggcgcaacgagcggccgtacaatcttaggaactttcatcgaaggcggattaaatctggaagagattaatcgttttcctaaccacctgattgaagtgggtggacatttctattgggatatttatgcattatatcgtcatattattgacggattgaagttggtggctcatcgtggcgaatccattgcttctatcggtattgatacctggggagtggattttgtatgcgtcggaaaagacggtaacctgcttcgtcaaccatacgcgtaccgtgatcctcatacggtaggtgcaccggaagctcttttctcccgtatttcgcgtagtgaagtctatggcaaaacgggtattcagattatgaattttaattcactttttcaattagatactttacgtcgcaatcacgacagcgcattggaggcggcagataaaattctgtttatgccggatgcattaagttatatgctgaccggagagatggtgacggaatatacaattgcttcgacagcgcagctggtaaatgctcaaacacgtcgtttggaaccggagttgctgaaagcagtaggtttgagtgaaaagaatttcggacgttttgtattcccaggtgaaaaggtgggagtattgacggaagaagtgcaaaagattaccggactgggggcaattcctgtaattgcggtagccggtcatgataccggttctgctgttgctgccgttccggcattggatcgcaactttgcttatttgagtagcggaacctggtcactgatgggagttgaaacggatgctccggtgattaatgctgaaacggaagcgttgaactttaccaatgaaggcggggtggaaggaaccatccgtctgttgaagaatatctgtggaatgtggttgttggaacgttgccgtttgaattggggagatacaagctatcctgaattaatcagtgaggcggatgcttgcgagccgttccgtagtctgattaatccggatgatgattgtttcgcgaatcctgcggatatggaaaaagccattgctgaatattgccgggctaccggacaagcagttcccgagaaacgtggacaagtggtgcgttgtatttttgaaagtctggctttgcgttatcgtcaggtattggagaatttacgttcgctttctccccgtccgattgatacattgcacgtaattggcggcggtagccggaatgatctgttgaaccagtttacagctaatgcgataggaatccctgtggtagccggtccgtctgaagcgacagctatcggtaatgtgatgattcaggcaatggcagcaggtgaagcaacggatgttgccggtatgcgccagttaatcaaccgctctatcccgttgaaaacttatcagccgcaagatatggaagcttgggacgcggcttatatccattttaagaattgcgttcgataatgcattgaacaaccgacagaataatcatttatttaaactaatagaatatcatgaaaaaagaagaactgattcagaaagcgtatgagattgctgtggaacgttatgcagcagtaggtgtagacaccgagaaagtattgaaaacgatgcaggatttccatctgtcacttcactgctggcaggctgacgacgttgcaggatttgaagtacaggccggctcattgacaggaggtattcaggcaaccggtaattatccgggcaaagctcgtaatattgacgaactgcgtgctgatattttgaaagctgcttcttatattccgggtactcatcgtctgaacctgcacgaaatctatggagatttccagggcaaggtggtagaccgtgaccaggtggagccggaacatttcaagagctggatcgaatggggtaaggaacacaacatgaagcttgacttcaactctacttctttctctcatccaaaatcaggtgacttgtcactttctaacccggacgaaggcatccgccagttctggattgaacataccaaacgttgccgtgcagtggccgaagaaatgggtaaggcacagggtgacccgtgtatcatgaatctttgggtacatgacggaagcaaggatattacggtaaaccgtatgaaatatcgtgcattgttgaaagattctttggatcaaatctttgctacagaatataagaatatgaaggattgtatcgaatctaaggtgttcggtatcggtctggaaagctatacagtgggttctaacgatttctatatcggttacggtgcttctcgcaataagatgattactttggataccggtcacttccacccgacagaaagtgtagctgataaagtatcttcattattgctttatgtgcctgaattgatgttgcacgtaagccgtccggttcgttgggattcagaccacgttactattatggatgacccgactatggatctgttcagcgaaatcgtccgttgcggtgctctggatcgtgtacattatggtcttgactatttcgatgcatctatcaaccgtatcggtgcttatgtaattggtagccgtgctgcacagaaatgtatgactcgtgctctgctcgaaccgattgccaaattgcgcgaatacgaagcaaacggacagggattccagcgtctggctctgctcgaagaagaaaaagcgctgccttggaatgctgtttgggatatgttctgcttgaagaacaatgttcctgtaggtgaagatttcattgcagaaattgaaaagtacgaagccgaagtaacttctaaacgataagttatggaaattttaatcggcttattgattatagccatcggtagcttttgccagtccagttcttatgtgcctattaagaaggtaaaggaatggagctgggaaagcttctggttaatacaaggtgtatttgcctggttagtgttcccgtttctgggttcactactgggtgtaccccaagagagcagtttgttcgacttgtggggagcgggaggtgctggaatgagcatcttttatggtatattgtggggagtaggaggtttgactttcggactttccatgcgttatctgggggttgcgttgggacagagtatctcattagggacttgtgccggtttcggaacccttcttccggctctttttgcaggtacaaacttgtttgaaggtaacgggctgattcttttgttgggtgtttgcatcacgttggcaggtattgctattatcgggtatgccggtagtttgcgtgcgcaaaacatgagcgaagaagaaaaacgtgctgctgtaaaagactttgcattgacaaaagggttactggttgcactcctggccggtgtcatgagtgcttgcttcgctttgggactggatgcaggaacacctatcaaggaagctgccttagccggtggagtggaaggactttacgccggtctcccggtgattttcctggttacatttggcgggttcctgacaaatgcagtttactgcctgcaacagaatgtggctaataaatcgatgagtgactatgctaaaggaaaagtatggggcaataatttagttttttgtgcgttggctggcgtattatggtacatgcagttcttcggactggaaatgggtaagagtttccttacggagagtccggtattgttggctttctcctggtgtattttgatggcattgaatgtcacatttagtaatgtttggggaattattctgaaagaatggaaaggcgtgtcaaacaagaccataactgtgctgatagctggtctgatcgtacttatcttctcattagtgttcccaaatttgttttaaaaaatttaggtatggattacatggattacgcagtttttttataacttgcgacgaaatcagtgtaatccatgcctaattaaaattatatatagaatgaaatcaattttagagaatcgtccgggacttgccaaagaagtaaacaaggtagcagaagttgccggatacttgtggcagaaaggatgggctgaacgtaacggtggtaatatcactgttaatatcacagagtttgtagacgatgaaatccgtcagatgaaaccgatcagtgaagttaaatctatcggtgtgactcttccttatctgaaaggatgttatttctattgcaagggaacgaataagcgcatgcgtgatttagctcgctggccaatggagaatggttcggtaatccgtattctggacgactgtgccagctacgtaattattgcggacgaggctgtggctccgacatcggaattgccttctcacttgagtgtgcataatgacctgttgagtaaaaactctccttataaagcgtctgtacatacacacccgattgaactgattgccatgacacattgcccgaagtttctagaaaaagatgtggctaccaatctgttgtggagtatgattcccgaaacaaaggcattctgcccgcgtggtttgggtatcattccttataaattgcctagttctgtagaactggcggaagctaccatcaaggaattgcaggattatgatgttgtgatgtgggagaaacatggtgtatttgcagttgattgcgatgcgatgcaggcgttcgatcagatcgatgtacttaataaatcggctctcatctatatcgcagcgaaaaatatgggcttcgagccggatggtatgagtcaggaacagatgaaagaaatgactgttgctttcaatctccctaaataaaacaacaaatagcacaaccatgaatcgaattattttaaacgaaacttcttacttcggtgccggatgccgaagtgtgattgctgtggaagcagctagacgtggctttaagaaagccttttttgtaacagataaagaccttatcaagtttggtgtggctgctgaaatcattaaagtatttgatgagaaccagattccttacgaactttatagcgatgtaaaggctaaccctactattgcaaatgtgcaaaacggtgtggcagcttacaaagcttccggagccgattttatcgttgctttgggtggtggctcttctatcgatactgccaaaggaatcggtattgttgtgaataacccggattttgcggatgtgaagtctctggaaggtgtagctgataccaaacacaaagctgtacctacctttgcactgcctactactgccggaacggctgccgaggtaactatcaattatgtgattattgatgaagatgcccgtaagaagatggtttgcgtagacccgaacgacatccctgccgtggctatcgtagaccccgaactgatgtactcaatgccgaaggggcttactgccgctaccggtatggatgctttgacgcatgccatcgaaagttatattactcccggtgcctgggtaatgagcgatatgttcgaattgaaggctattgagatgattgcacaaaatctgaaagcagccgtagacaatggtaaagatgtggcagcccgcgaagcaatgtcgcaggcacaatatattgccggtatgggattctcgaatgtcggtttgggaatagttcattcaatggctcatccgttgggtgcattctatgatactcctcacggggtagctaatgccttgctgttgccgtatgtgatggaatacaatgctgaatctccggcagctccgaaatatatccatattgcgaaagcaatgggagtggacactaccggaatgagtgaagcggagggcgttaaagctgctattgaagctgtgaaagcactttctatcagcattaatatcccacagaaattgcatgaaatcaatgtgaaagaagaagacattcctgcattggctgtagctgctttcaatgatgtttgtacaggtggtaatcctcgtcctacttcagtagcggatattgaagccttgtatcataaagcattctaaatctcgtcatagtaaagtttgtttttatataaacatccggggatacttgaaagtacactccggatgtttttttatacccttgcgtgtgttttctgaaaataattcctatttttgtccaactcaattacatgaaaacactctgatatgatcgaggataatagtttgggattggaatttaaatatctgattgtaaatgacatggaccgtaaattcgggctgtgggtgaataccgtcggctatcagtctatccctcctgattcaccttatccattgaaagagcatccctccggttacttttttaatgcggaaaaaggaagggtgcttcgcgaatatcagttggtttatatcacaaaagggcgtggtttgttttcatccgattccacttctgaaaagcaggtttgtaaaggccggctgatggtattgtttcccgggcaatggcatacttaccgcccgttacggcagactggttggacggaatattacatcggctttgaggggccaatgatagatgccatcgttaatgatgcttttttgtcgcaggagcagcaaatattggaaatcggtattaatgaagagttggtttccttgttctcccgtgctcttgctgtagctgaagcggataagatttccgcgcaacaatatctttccgggattgtgctccacatgataggtatgatactttctgtctccaagaataaagttttcgagatgagtgatgtggatcagaagatagaacaggcgaaaatcatcatgaatgaaaatgtttccggtaatgtagatccggaagagttagcaatgcggcttaacatcagttattcatggtttcgacgtgttttcaaggagtatactggttatgctcctgccaaatatttccaggaattgaaactccgtaaagccaaacaaatgttagtaggaacttcccaatccgtgaaagagatttctttttttctgggtttccagtctactgaatattttttctcttttttcaagaaacgtacagggcttaccccgttggaatatcgttcgttcggacgggaagaataaaatagggtgaagtctatatctatcagttattttgctctgattttgggaatatcataaaaactgttacttttgtgacgagattaatgtgtgctataaaccatcattcttgatatgcgcgaacaaagactatctaagatccatttttttattctgctatctctttttggatttgtatttccactccggtcacaggaatacaagttcagaacattgggtgtggaagatggattgtcgcaaataacggtgagcgatatttgccaggatgagaaatcgcgtatatggattgccactctggacgggctgaattgtttcgatggcaatcacatcaaagtcttcaaccactttcataacgactctatcagttatggtaatttatatgtgactcaaatggtggaagacggtcagggaagtcttttcctgttgacctctaccggacttttccagttcgaccttgaaacagaaaaatattatattcttccggtgacttctccctccactcttgccaaaggaaagacgggagtgtggattgcagaaggagggaaactgttcttatacgataagaatacccgcctcttgaaaccgatgtatgccgatttgcagctgccggatagtggcccgacgatggtggaaggttccgaaggaagtctctggattgctttgaaagagggtggggtgatgcgtgtagatacttgcggatcgatgtcacttcacttgcccggaattaaagtgatgaaactgataaaaagtaacgaccagaatatctggattggttcgcaggatcagggcgttttctgtttttcacctcaaggtacgatcatacatcactatgaatataatgataagagtgtttacacggttcgggacgatatggcgagagcgttatgtcaggatttggaagggaatatatgggtaggctacagaagtggattgagtaagattgaagtggctaccgggaaaatattccattatcaggctgatcctaaccgggtgggtgctatgtccaatcgttcggtgacgtctctttataccgacaaacaaggaactgtttgggtggggacttattggggaggggtaaacttcttctctccggaatatcagcattttgtgcattatcatgcttcggacaccggattgtcttttccggtggtcggtgctatggcagaagataaagtcggaaatatctggatttgtacggaaggagggggattagatttatatcaaccggaacagggaaagttcaagcattttaatgcgcatacgggatatcatttcagtacggactacctgaaagatgttgtttttgatgaggctaataattgcttatggattgcagccgactttaccaataaggtgaattgttttcatcttaataactatcggaatgatatctataatctcgaaccgcttggagaagaaagtgtaggagaagccctgtttgccttggcggatactcctcgtgaattgtatgtcgggacaacatccgctattgtgagtttggataaacagaccttgaaatccgaggtgttgtttcatcagaaggaactgtttacacataattataacaccctattgcttgattcgaaaaacagattatggtttgctgccgacgacggttgtgtagcctatgtgattgatgaaaagcggtttgaaacctataggataagtctgaagaaacgggtcagatctcaaaaagagttggtcaatgttatctatgaagatcgaaagggaaatatttgggtagggacacatggcaacggacttttcttgctggataagaaagaacgtttgtttcgtttacatacttctgaaagtgtgttgtcgggagaaaatatcagggtactgggggaaaccccttccgggaatttattgattggtaccggacatggattgtcaatgctggaacagaaagaggggaaagtgataaacttcaattctaaaaccggattcccgctgactcttgtgaaccggaaatccatgcatgtatcccgcaaccatgatatttatatgggaggagctaccggattggtaaccattcgtgaaagtagtctgtattatcctccgaaaatatacgatctggagttggctcatttgtatgtcaacaacaaagagataacaacaggcgatcaaaccggtattttaaataaatcctttgcctataccggacggatcaaattgaattacttgcaaaatgtgttttctatcggtttctcaacagataattttctgcatataggcggtggtgaggtagaatatcggttgatggggtataatgatgaatggagcgagaaccgtctgggaaatgacattacttatacaaatatctctccgggtgattatgtctttgagatcaggctgaagaacttcccggaagtaatcagatcgctggatataacgattacgccacctttctatgctacttggtgggcctatactatttatgtatgcgtgattctgactattctattcttcatcgtgagagaatatagaatccgtctgttcctgaaaacttcattggattttgaacttcgcgagaaacaatacattgaagagatgaatcaatccaaacttcgtttcttcacgaatatctcgcatgaaatcagaactccgatcactcttatcctggggcaggttgatctgttgctgaattccggcaaattgtctacctatgcttattcgaaactgttgaatatacataaaaatgcaggtaacctgaaatcattgattacggagctgcttgatttccggaaacaggagcagggacttttgaaactgaaagtttctcaatttgatttatattctttgctcaaagagcattatgtattgtttaaggagttggctgctaacaggaatatttcgtttgttttgcatgccgactgcgagcaatgcctcgtgtggggggaccggatgcaaatacagaaggtggttaataatttgctatctaatgcttttaaatatacttcagacggtggaactatccgtatggaattggctgatggaacggaggaatgtatgttttccgtttcagacaatggggcaggaatatccgaggaagattacgtgaagatattcgagcggttctatcaggccgagaatatcggacagtatggaggaacgggtatcgggctggctttaagtcaggggattgtgaaagctcatcagggagatataactgtagaaagccagttggggaaaggttcatgctttaaggtcactctgaagaaaggagatgctcactttgattcttctgtttcccggattgaaccggagcaggataaggaatatatttattattcggaagataaagaactattggttaaggaggtacaaacggctcaaagtgagagtgggactactgactgcaagctgttggttattgatgataatgaagaaatcagaaatatccttgtagatatcttttctccattgtacacggttgaaactgcaagtgatggtgaggaagggtatgagaaagtaaagatgatgcaacctgatctggttatttcggatattatgatgcccggaatgcccggaacggaattgtgtgccaaaattaagaacaatattgaaacttgtcatatccctgtcgttcttctgactgcccttagtgcgcccgaacgtgagttggaaggattgagaattggagcggatatttatgtggtgaagccgtttaatatgcggcggctggtgatgcaatgcaataatctgattaatacccgcagacttttacagaataaatatgcccatcagctggatagcaaagcggagaagattgcaacgaatgaactcgatcagaggtttatcgaacaagcgacgcaggtagtggaagataatatggaaaatcccgaattcagtgtagatgtcttctcacgtgagatgggggtgggacgtactgtcttattccagaagataaaaggtatcacgggaagtacgccaaataattttatcatgaatctgcgtctgaaaaaagcggcatattttctgcagaattctccggaaatgaatatatcggatattgcttaccggttaggatttggaaatcctcaatacttcaataaatgttttaaagaactttttgatattgctcctacgcaataccgaaaagctcataatacctcctccgaaccctctgtgaagtgattaaaataagtcatctgaatttttagactagataaaacgaacaattcgatagggtgcaatatattcaaatgcgatacttttgtggcgttggataatgccagcttgtacttgagttttctttggttaggtgtgtccgcacacactttcatttggtagaccgggtgctgtgtaatctttattctaatataataattattgtgtagtattatgaaagacaaatatccatatagtaaataaaagatagcatcttattggagagaatcaatatatttttcccaattaattaagtagtgagtaaaaccttgataattaaccaatttaattttattctagttatgaaaaatttgcagagtaggacaaaagtgcggttgcttcagtcgttccttttgatttccttgagtctctttttccttgtcaatccggcttatgctcaaggcgggtttgcagtgaagggagttattgtggataaaacaggatttcctttgcctggcgccaatgtgatggaaaagggaacatctaatggaacaattacagatttagatggtaatttctcattgaatgtttcgaagaagggagttactttgactgtatcattcatgggatatacccctaaagatgtggtagtgaaagataaaacaatgaatattacgcttgaagagaactctaagctattggacgaagtagtggtagtgggttacggtacgatgaaaaagcgtgatgtaacaggagctattacttccatctcaagcgaggccattgagcaaaaaatggctactaatgtttttgaagcactgcaaggtactactgccggtgtacaggtggtgtccggttccggacagcccggtgaatcttcttctatcaaaattcgtggtacttccactttttctgccgaaggtgtgactcctctttatattgtagacggtgttcctttggaaagtatcgatggtatcaataccaatgatattacttctatggaaattttgaaggatgccgcttctgcagctatctacggttcccgttcggctaacggtgtgattattatcacaaccaagagcggtcaggaaggtaaggctcgtattgatatcaagtataatcactcatggggtacattgtctcataaggtgccacaggcaaatcgtaaagagcgtctgttgtacgaccagtaccgcaaagagtattttgaaacatacggcggaggtaatccggatgaaagtattgatattctgaatgatccgttgaactcattcttcaatgtagacaatgattatctggacatgattacaagtactgcgcagaaagatcaggtggatatcagcgtaggtggcggtacaaagaaactgaaatatttcatcaataccggttattataacgagaagggtattatttccaataccggtttccagagattaaatactcgtatcaactccgattattcaccgacagactggatgaatatgggtagccgtatttctcttacttattctaaaaagaaaggtctgaatgaaggtacgttattgagcgcagtgttgactcgtcgtccttatttcaatacttattatccggatggctctttggtcggggtgtttaatggccagaagaatcctattgcacaggtcaattataccactgactttacggattcttataaggctaacttcttccagttctttgaaatcaaattcaacaagtacttgaagttcagagccaatataaatgccaacttctatttggacaagcgcaaaaaactcgaacctagtcttattactgatgaatggcagaaacagaataaagggtattcttataattacctcaactggaactggatgaatgaagatttcatcacttatgcacgcaaaatcaaaggacataatttcagcgcgatggtgggtgtcagtgctcaacaatggcgttatgaaaatgaaacctttgtaggtttgaattcatctaccgactttatttatacgatgaatgcatttgctgccaatttggatttgtcatctacaggatctaccttgagtaatcattccatggcttctgtctttgcacgtgtgacgtatgattatctgggaaaatatctgtttacagcgaatatccgtcgtgacggctcttctcgttttgcgaaagaaaacaaatggggtaatttcccttcagtatcagtgggatggcgtttctctgatgagaaattcatgaagttctcgaagaaattcctggaagatggtaagattcgtgtaagttatggtatcaccggtaatgaggcgatcggaaactatgattatatttattcttattctccgaattctatctatgacggagtgggtggcgttattccgactcgtatcggtaaagacaatctgaaatgggaggaaaccaaacaattcaaccttggtttggacttgaatttctggaatagccgtttgacaatcactgctgattactacgataaatatacagacggtttgttggcaaactaccaactgcctaaagaatccggttttgcatatatgaagacaaacgtcggtgagatgagcaaccgcggttttgaaattgccgttaccggtgatattatccgcacaaaggactggaagtggaatgcttctttcaatatctccagaaatatcaaccgcattgagaaactgtctgaaggtaaggcatatatggaaggtgatatctggtggatgcaggaaggcggtcgcgtaggtgacttctatggatttaaaagtgccggtgtctttgcttatgacgaatcgaatgcttttacagataaatgggagcaactgactccggtgtttgaaaatggtgtattccaatacaagtatttattgaatggaaaggaatatgcaggtgatattcgccagaaaacgttaccgaacggcaaaccgttccgtggcggagattacaactgggaagaaccggaaggaacccgggatggtgtgattgatgataacgaccgtatggtgattggtaatgccatgcctgatgtgaccggtggtttgaatacaaccgtgacctggaaaaacgtaagtctgtatttgggattctattattctttgggaggacagatttataatgccgctgaacataatcgtaacatgttcaaatatacgggaaccactccttcaccggaagtaattcataatatgtggttgcatccgggcgaccaggctatctatccgcgtccgtataatgatgattataacaatgcacgtatgggtaactcgttctatttggaagatgcttcctttattcgtctgcagaacgtacgtatagcctatgatcttccagaaaactggataaagaagctgatgttgaagaatataaatatctacgcttttgtaaacaacgcattgacatggaccaactattcgggatttgatcctgaattctctacgagtaatcctctgcaggtaggtaaagactcttaccgctatccgagaaagagagaatatggtattggtttttctgcaaacttttaattgaagatatcgtatgaagaatataaaatattttgttggagctgtatgcctggctctatcattgaatagctgttcagactttctgaatgaggaaccggtgagtgaaatcccggcaggtgacatgtggcagaccgcccgtgacgctaaggcaggtataaatgaaatttatggactgttgcgttccactttacgcgagaattatttttattggggtgagttccgttcggataacgtagctcccggagcaccggtgatggccgatcaggcacgtgtgattaacaacctgatgtctacggacgagaaatgtgcgaaatggacgaccttgtatcagatgattaaccagaccaatctggccatcaaatatgttcctaatatcagtatgcctgatgtggcagaccgtaatgattacctcggacaagcgtatgcgttgcgtgctttggcttacttctatgctatccgtgtctggggagacgtacctttgtttatagaacctactgaaaagtattcggaggctatctacaaggaacgtacagataagaattatattctggaacatgttattcttcctgacctgaaaaaggcggaaagcctgattaaccgtaataagaattacgaacgcaagcgtatttctatctgtggcgtatgggctatcatggcggacgcttatatgtgggctgaagaatataatctggctgaccagaccattgataaaatggcaactattgcttccaaaaagggtggacgctttgtagacttcgaacctaacattgctacttggcataccatgtttacggaagaactcaacaataagccttcggatgatacgcccgaaaatgatgaatataactccagagagttaatattccttgttcatttcaacatggatgaagtcggcacgaatggttacagttatatgtatcaatggttttccggttcaggaaaccgtgcggcagttatgtccgacaagtttatgagcatctttgatgaaaaggatatgaaaggtgatttgcgcaaagattatacggtgaagaattaccagaatggaaatgaattgcgtaaatatatggcaggtgacatcagtaactctttgaataagacatgcgaagtagcctatccaatttatcgttacacagatatgatgttgttgcaagcagaagctcgtgctcatcagggaaaatggggtgaagctttggatttagtaaaaactgtacgtgaccgtgccggattgaacacgttgactgaaaatgattttgcttctgaagacgaagtcgttaattatatattgcgtgaacggcaagtggaattagccggcgaaggacgccgctggtttgacttgttgcgtaccggaaagtggaaggaagtgatgaaaccgattaacggaatggaacaggacggaaacgaactcttcccgattcactattcacatatcttggaaaatccgaagattgtgcagaacacgtattatggtaatactaacaactaaaaaaggtagaaacaatgaaaaagacaatattatataagacccttttcttttgttgggcgatattggcattgaccggctgtgacctggacttgcagaagaattatgattatgagccttcggtggatgatccgtatgtaaaagtgacagcgtgggaatatttccaagatcacaaagatatgttctcggagttgatagcagctattgagtatacaggtctgaaggactattatacccagactgacaataaatatacttttctggctttgaataatgcaggtatgcagttgtatcgtgaaaatgaatttgcaggtgcagcatccattaccgattgtgataaagagaaagtaacgaacatgttgctttatcacattgtagacggtgaatatagttcttatggacagttgcaggtggaaccgatgttcgtattgacgatgctgaaaggagagaatggactgatgacaatgtctgtatggaaaaacccatggcaggctgcagtaggtaagattctggtgaatcagaccggaagcaacgggaaatctccacagcgtcaggctaagactagcaacattctgccgacgaacggtgtgattcatatatttgagaactattgcaaatattccaaataaccacagttaattaaaaagagaactaattatgattcgtaaaatatataccttattaatactaggactttgcctgggctttgctgcctgtagcgatgataatgatggtctggatcctaatgcggctgctcctgtgattaaattcccgatggaacaactggatgtggatttaaataaagtagataatctgccggtagtggctgtcataaagtcgcaggccggactccagagtgtgacaatgaaattgcagacagtggagggggtgaccgaatataaaacggtgactgaattttttaatcccaattcttacagcttgtctgaaaatctggaatacaatgcaaattacgaagcctttatcattgaggctacggataaattgaatcatgttacgagcggaactttaccaattgctgttaccgatgtaatggcacgtcctgtcataacattcgacccggaagagattatatatgatgaaatggatgagaatccggtaatgcctcgtactacttttaaaattgtttcggaagcaggtttgaagaaagtggaaagattcttggtctctacggacggacaaacaccgaaaggcagtgatatactgaatggcgacaaaacgtatgagcacgatgaactgatagaatataaagaaggcgataagggctttaaagtgaaagcggaagatatctatggtaatatcacaatttctactttgcaggtgtcatataagactgttccggttcctgtattgactttgggtaaagagcttattactactgatgaaggagtagatacggaagttccgatgcacatcgaatccgttcgcggtgtaaaacaggtagctatcttccgggtggagaatggagtaagtacagagattttccgtgagcagatagtgggcgataacaagaattttgattataagcctaaggtgcaactgacagaagaaacatctcaactcaaggtggttgtttctgatggtcgggaaggcaaggaagttatagggatcgtaaagacctatgtgaatatggaagttgtccaacttaaggttggcagtcatgtattggccaatgccgaaccgttcgctctgatttcgttgaatgatatgaaaacgtattcggtagatgaagctatctccagtgtggaaagtgctaagaatgttgatataaagttctttataaattctgctaatagtgttctttctttccgtttctattcgatggagaatgtagatagcaagaatagtctgtataaaggatcgggcggaaagtccttgagcaatctgccggctaagaatatgacaaaatttgtgttattcccggcaggctttgattacgatgcggcttctcgttcttctattaagaatgaatatttggctggaagtgccgatcagaaagtgtatatgacaattgataactttgtcggcagtgtgattggatttaagactagtggtaattcgagtgccggtggagaaagatacggtgtcatgaaggtacttgatgtctccggaaagatggataataatacgaccaaacagatagcaacggttgaaatcaaattccctaagaagaagtaaacagggtagtattacctagcgtctgaagtcttaatagaaaacttcttttctattaagactaaacttccctttcattgggaataaagttgttctctgtccgatacaaactataaacgaagcttccgtttttataaatgcaagttgcgtttataaaaacaaagctttcaattatgaaaacaaagcttgcgtttatagtttataatagggataaaagaagtttgcaacaagggggaaggaagttctctccttgtagagaataacttttctattaatagccaacgcgagagttagtaacagctatcccggtgaaccgtagatagagtatacgaaagatgcgactgataacaaatacgatggttaagtaataatgtgcagtagctgaaagtaatatgagaaaacatataatatataggtatttcctctttttatctttggtcggactgatgcagttgacgtttagctgttcctcctcttccaacgaaatagaacctttgaaaccggaaggagaagatactcctttggaaaaagatgaatatacttttatgaatgtagaataccggaagtggcagaacggaactttccaggcatggacaacggcagattcaagggaaacacgtaccattgataatatgaattggtatactccctcttcggattatagccggactgcatggggaggacgaatcggtttacaaccttcatctgtggttggaaaagaaggctttttccgagtggctaattgtggaggccgttcttatttgctcgatccggataatggagctgttatcattcatggaattcagcatgttcgtccgggagaatctactgctcataagaaggctttcggtactcgatacggtagtgaggcgcgatggagtgaagagactggcaaactgttagcagacaatcatataaactatatttcgtatggctcgaaccgtattgaagtatttcctgctgcagtacgtggtaacttgttgacccctaagacgcaaaagattgcttatgcagagaatctgtatctgcttcgtacctttatgtgggatatgagtaagaatttgggctacgcgtttgatgatgacaaatataatcgcttagttcttctttttgaacccacatttgctacgtacatagatcgtctcgtacaagagaagtcagctttatttgccggtgaccggcattttataggtttctatcttgacaatgaattgccatttgccagttatcagaatgctgaccctttgcgaggaattgatctgaaacatttcttgtctttgcccgaacgctataaagctgctcgtgagtatgcagaaaagtttatgcgggataacggtatagcttctaccggagtgataaccaagaaaaatcaggaagatttccgggggatggttgctgattattattatcagttgaccaccgctaccgtcagacgatatgataaagagcatttgatattgggaacacgtctgcatgattggagtaaatataatcagaaagtggtggaagcgtgtgctcgttattgcgatcttgtttccgtcaactattatgcacgttggcaaccggaggcagatttcttggcaaacctgaaagtctggtgtggagcgaaaccttttttagtttcagaattctatataaaagcggaagatgccagttatcagggaactggatatgctaatactgaaggaggtggctggttggtgcatacacaaaaaaatagaggtgagttttatcagaacttctgtcttcgtttgcttgaaactcgaaactgtgtaggctgggtacattttgagtataatgatggttacgattctaacggaaaagcttctaataaaggagtggtttccatcgaatacgaaccttatgaatcttttctgtcgcacatgcggcagttgaatctttcagttcattcattgatcgattattacgatacaaaatcggttcaatagattgacggaaactttaaatagacaaattgaatatttagaattaaaatagttatgaccatgaagaagtttagtttatttgcaatccttttaggatttaatatagctttgggagcatgttccgatgatgatgccgctcctgtagtaaaaaatgaaatctttcaacttccggaaaaggcttatgtactggcggaacaatccagacgggctattgtcatcagagatgcggagacgcaccgcaatatttggagttgggatccttatacagcctgtgttcctgctgcacagcagggttggtttgttaatccgagtgaagtaaaaccggttttcaatagacgctatatcttgatgactgcctccggcggagctgtggctttaatccgtttgtccgatcataaattaatgttctacgcaaattgcggacagaatccccactctgcggaggtattgcccgatggaaatatcgtgacggcagaatctaaatccggtgaaatcaatacctttgtggttgacacggttaaggtattgggagcaaaagctaatacggtgaagttgggtaatgcgcataatgttgtttgggataagaaaagatcgtatctttatgctacagctaccaaaaaagagggagtgactgcattattccgttttaagtacgatggcaaccggagtaatcccaagttaataaatcagactaccctttatacattcagcaatgaatcgggtgggcatgatttgttcccggtatatggtgaagaagataaattatggcttactgctgcttcggctgtctataagtttgatttgactggagttaccgacgctacgactaatgactctaccgaacctacttgcgagaaagtttacagcatagccgatataaaaagtatctgcaacggaccggatggaatcctgatgttgaaaccgactgaagagtggtgggcagaaggacttgtaaatgagaagggagaagaacttttcaaaatggacggagccaagatttataaaggccgttggatgatagacaatcttttcagttatccggaaaagcatgatttcgtgttgagtgaggactgattaagtatggtggaagattgattaagtacataagttgaataattaagtttggaacaatgaggaaacttcttctttttttattggtatctatcgcattaccggccttggcgcagaatggaaagaaagtgtatgccgacttccacggtgtacgttacacccggcagcatgacggaaagttgggccgttgggaaatgtatgccaatacggaaaaatcaagtaccggaaggaagtcgctgtgttataatgccgatctgatagatagtgaagggcggcatgagatagcggcagtggcttatccccaagtcggaatgcagtccaatctcgatcccgattatatcgaatatcagatattgtcggcaaaagcggctaagatagatggattctttatcgaatgggggttcaagcctcacgaaaatgacatcttgctgcgtgagatgcagaaagtggcagcaaagtatgactttgaaatcggcgtaaactggtgcgacggttggttatattatgactggattacgaagatttatccggaagttaacacccgtgaggcaaagaccgaatacatggctaaatgttatcaatatctggtagatagtgtcttcacaggtccgactgctcctatggtgaaaggaatgcctgttttttatcatttcggtcccggagcgaaagtcgatgaatacaagaaagtgttatcacaagtgaagtttccgcaaggaatgaggcagcccgttgccttacgccgttgggcggattggggaaaactggaaaatgataaatacattcccgtcacccgcagtgatgatatggatgcttgggaaaaagtgggagaaataccgactgcatggcttcctgcccgtgttcgcacaagagatcaggcacatgctgaatgggataattatgccacacaggatgatgttattgagtttatgaaacctttccgtgattcaatttggcatagtaacaatcctgcttataccattaagtcgggatttgccatgccgggaatggataaccggggctgtgcaggctggggacgtggacacttctattatatcccacgtaacaatggagaaacttatcaaagtatgtggaagttctgtatggcagagaaggacagtctggacatgatgtttatcgcttcgtggagtgactataccgaaggacacgaaatagagccgaccattgaaaacggtgaccgtgaactacgtacgactttaaagtatgcggcggaattcaaagacgaacaggcggacgagcgtggattaaccttacctttaatgcttttccggctgcgaaaagaagcccgtttcctggaaaagacgaagatggacgtatccgcttgtcaacgttcgctcgataaggcggcattgttgattagccagggacgttatccggtggcaataggcttgttgtcacaaatagaaaatgatgtcaagacggcaaaatccgctttggcggttgagatgatgcgtttgcgtgagtcgggcatgaagattcagggaaagcgaaaatccggtggttacagtgccgaagaaactctctctgtctctttgcccaaagagctggtttccaaattacaaatgaataactatgtagggtatctctattttgaatacctggacaagggaaatgaatctctttttatacgttcatctacacagcgcgaaccgaaagagccgtttaaaattgtatcccggatacgtaccgacaatacaggtgaatggaaaagtgcaaaagtagaattgtataaggataatatcgtgaatggattcaatatgcctactttctatttaaaaggaaatgtcgtagttcgtaatttgtcattgggttatacgatctacacagtcaaataaatgcatggatgaagagttttaattggttattagttttatctgtactatcctgcttcggatgttcctctccggtccatgaagatgacaggggatgtgctttcgtatctgacagtattcaatatcgggtcgagtttatgtcggcggggtgcgtgcggattctgtcttttcccgaaggtgatacgctggtaacaaaaagattggtggtcgattcggaaaagccggcttttaaagattataaatgggaagatacaggacagaagctggtctttcgcacccgtgaactttccgtagcttttgataaggcagatgcggctttcacttttcaggaaacatccacaggtaagttattactaaaagagaaaggcgataggagggcacggaacttcaaacgttcggttgccggaggtgaacaatgtctcgaagtcactcaacgctttgttcctaccgaggatgaggccatttacggactgggacagtatcagaatggaatcatgaactaccgggggaaatccgtacttctgttacaggccaatatggatattgtcaatccgttccttatttcgaccaacggatatggtgtcttatgggaaaattattcttctacgaagtttgaagatacgaaggagggctactcatttacttccgaagtaggtgatgcctccgactattattttgtctatggcaagaatatggacgaagtcgttgccggttatcgggaattgacgggggacgtgccgatgtttggaaaatgggtgtatggcttctggcagtccaaagaacgttataagtcgttcgatgaattgaaggcagtcgttaaagaataccgtaaacggggaattccattggataacattgtgcaggactgggaatattggggagacaaacctcattggaacagcctgaccttccatccggcaaactttaatcatccccgtcaggttattgatgaactgcatcaacaggaccatgttcattttatgctttccgtatggcccggattcggaccggaaacggctgtctatcagtctttggattctatcggtgcattgtttagtgaacctacatgggcaggttataaggtttttgatgcctacaatcctgtcgcgagggatattttctggcaatacctcaagaaaggactctatgatatgggtgtggatgcctggtggatggatgcaacggaaccatctttccgggatggattcacacagttgaagcaggaagaaaagaccaaatcagctggtaatacttatctgggtagcttccaccgttatctgaacacttattctttagaaatgctaaaggacttctatcaacgcctgcgcgccgagagcgatcagaagcgtatatttatcctaactcgttccgcctttgcctcgcaacagcattatggtacagccgtatggtcgggtgacgtttcggcttcatgggagaatatgcacaaacaactggttgccggcttaaacttgtctatgtccggtattccgtattggacttccgatacgggaggattctttgtcacagaacgggatgcaaaatatcccgacggactgaaaagtaatgattataaagagttatattcccgttggttccagtttagcgcatttactcctatcttccgtgctcacggtacgaatgtgccgcgtgaaatttggcaattcggtgaagaggggacattatcttatgataatcaagtgaagtatatccatctgcgttaccgtctgttgccatacatttactcaatgtcccatcaggtaaccgccaataattataccatgttgagaggtttggcaatggatttcacaacagatacccggacatttgatattgataatgcctatatgttcggtacttccttattggtgcgtccggtatttcatccgcaatcggaagaaaagaacatctgtatttatctgccggaacacagtggtaaatattggtatgacctctggaccggagaagcttttgaaggaggaagagaacaaatgcagacaaatatcctcgacatacttccgctctatgtgaaggctggttctatcttgcctttggcagaagtgaaacaatatgcgatggaatatcccgatcgtgaactggaattgcgtatctatggaggagcggatgctgcttttttatggtatgaggatgaaggtgattcctaccgctatgaagagggtgtatgttcgaaagtgccgatgcaatggaaagattcggaacggacattgactattggactgcgtgagggaacttatcccggtatgccggaacaaataaaaatgcatgtgaaattatatctgcctgaaggtgcaggtcttgatagcaaagagtgcgtctacacaggtagagaagtaaaaataaagttttaattataagtatatatcgattatgaagaagtttctctatatttttattctattgtttattgtgggatgggcacaggcgcaacagcgtgtggtatacacaatcaacgacggatggaaatttacaaaaggatctccgtttgaagcgcagctggccggctgtgacgacttttcttgggagacggtcaatatacctcatacatggaataataaagatgcagacgacgaaactccgggattttatcggggaccggcttggtaccggaaacaattgtttgtagataaaagccaggagggacgtcaggcagtgatctattttgaaggagccaatcaggaagtacgattctatctgaacggtcagttcgtgggagaacacaaaggagggtatacccgtttctgttttgacatcacttcccatttgcgttatggacaggaaaacctgtttgccatttatgtgaacaatgtctataaccctaatattcctcccttatctgccgattttactttctttggcggtatctaccgggatgtctatctgcagtttatgaatccggtgcacattgcaacgaatgattatgcttcgtcaggagtttatatccgtacacccgaagtgaacaactccgcagcctcggtagaaattactacattactgacgaataatacacttcaaccagcagaaatcagggtggaaaatgtaatctgcgatgcggatggtaaggaagtgaaaaagactcatgcggaaataaagctggcatccggtgaaacaaagacagacatctctaaaaagataaaaatagattcgccccgtttgtgggatatagacgatccttatcggtatatggtatatacgcgtattctcgataagaaaaagggtactttgctggatgaagtggtgaatccgttaggcttgcgctggtttaaatttgattcggaaaaaggctttttcctgaatggcaaaggacgtaaactaatcggaactgcccggcatcaggattattttcagaaaggaaatgccttgcgcgatgagttgcatgtacaagatgttctgttgttgaaagagatgggagggaacttcctgcgtgtgtcacattatccccaagatcctgtaatcatggaaatgtgtgataaactgggtattgtgacttcggttgaaatccccgttgtcaatgctgttacggaaactgaagagtttttgcagaactccgttgagatggctaaagaaatggtacgtcaggatttcaaccgtccttctgttatgatttgggggtatatgaatgagatttttctgcgtcgcccttataccgaaggcaagcaattggaagattactaccgctttactgaaaaagtagcccgtgccttggaagcgaccattcgcgaggaagatccttcaagatataccatgatggcttatcataatatgcctcaatattacgaagacgcccatttgaccgaaattccgatgattcaggggtggaacctgtatcaaggctggtatgagccggatatcaatgagtttcaacgtttgctcgaccgtgcccataaggtatacaggggaaaagtgttgatggttacggaatatggaccgggagtagatccgggacttcattcctaccagccggaacgtttcgacttctcacaggaatatggtttggtgtatcataaacattatctccgtgaaatgatgaaacgtccgtttattgccggttccagtctgtggaatctgaatgatttttattccgaatcccgtgtcgatgctgttcctcatgtaaacaataaaggagttgtcggattatacagggagaagaaagatgtctattggttttataagacagctttgtcacgtcgtccgatacttgttataggtaatcgggagtggaaaagccgtgggggagtggtgaatactgcacagaaagaatgtattcagtctgtccctgtattctctaatgcggaagaagtagagctgtttgtgaacaataaaagtctgggaaagaaaaaggtagaagataattatgccttgttcgacgtaccgttcgttggtggagagaatctcttggaagcagttgccgtggctggtgatagcaaattgcgggatatgctccggattcagttccagttggtaggctcacagttgaaagacgaagcaattccatttacggaaataaatgtaatgttgggttctccgagatattttgaagaccgtacagcaaatgtagcatggattcccgagcaggagtataagcccggtagctggggatttgtaggcggaacttcttatcgtcgtaaaacaggattcggcagtatgcttggttcggatattgacattctgggaacggatatgaatccaatcttccagactcaacgtgttggaataaaatcttttaaagctgatgtaccgaatggagaatattccgtatatttgtactgggcagaattggagtcggacaaagagagggaagcgttggtttataatctgggagctgactcggaacagacgtttgccggaaaccgtagcttcggaatttcaatgaatggaacgactgttttggatgatttcaacatagctcgtgattacggatatgcccgtgctgttatcaagaaatttgtagtaacggtgaaggatggaaaaggattgagtgttgacttccataaaaaagaaggagaacctattctgaacgctatccgtatttatagaaactattaatcataaacactgtcaatatgcttaggtctatttatttactgtcttttctcctcctgcaatctttatttgcttttgccgggaatgtaaaggagaatgttccgtcctcttttgatttgtatgtatgcatcggacaatccaacatggcggggcgtgcaacattaactccggaagtcatggataccctccaaaatgtgtatctattgaatgataaggggaattttgaaccggcagtaaatcctctcaatcgttattctacagttcggaaagatttgtcaatgcagcgtttgggaccggcttacggctttgctaaagagatggcccgacaaacgaaacgtcctgtcggactggtagtaaatgcgcgtggaggctcatccatcaactcctggctaaaagggagtaaagacggatattatgaagaagctctttcccgggttcggattgcaatgaagcagggaggtgttttgaaagcaatcctttggcatcagggagaagccgattgttcgaatccggaagcgtataaacagaaactgatttctttggtgaaagacttgcgggaagatctgggcatgccgaatctaccggttgttgtaggacagatttctcaatggaactggacaaaaagagaagcaggtacagtcccctttaatcagatgattaaaaaagtttcttcatttattccccattctgattgggtatcatcgaaaggattgggatggtataaagatgagaaggaccctcattttaatacggaagcacaactgttattaggaaaacgttatgcgaaaaaggtactgaagttctataaacatcaatagaataccctttttcgaggaacataaaagccggctgattcatgagggatcagccggcttttgtatggtgaataactaaatactgccttgttgatagaaaaggaatctatatagttaattgttttattataagtaaattaacctgttgataactttgttgatatccttgttgataactgaaattaggttgtgaataaaaccagtaaagaagagtcgtcataaaaaagaagaaccgcatttctgcgattcttcttatctttagttgcggagatccgactcgaacgaatgacctttgggttatgagcccaacgagctaccaactgctccactccgcgatgtttaacgggtgcaaaggtacggctttttttgaaacaaacaaataatttgctgaatatttttcgagtaaatcatcatttttttcttatttggttgagaatgaatgaaataatgatgaaactttttcttagcacctattaatatacaaatgttaatattctctctattttcttgtatggtctaaagaaaagaattacttttgctcaaaatattcagcaatgtgcaatttgtaacctatgaccgtatccaagacaaaagccaaattagtagatgtagcccgtcagctttttgcgaagatgggagtagaaaacacaactatgaatgatatcgctcttgcttctaaaaaaggtagacgaacgctctatacttattttaaaagtaaggatgaaatttatttggctgttgtggaatcggaattggatattctgtcggatatgatgaagcgggtggccgagaaaaatatctcaccggacgagaaattgttggagatgatatatacccggttggacgcggtaaaagaggtggtctatcgaaacggaacactgcgtgcttatttcttccgtgatatatggcgggtggaaaaagttcgcaagaagtttgatgcaaaggaagtccagctctttaaagccgttcttctggaaggacaggcaaaaggagttttccatattgacgatgtggagatgactgccgacttgatacattattgtgtgaaaggaattgaagttccttatattcgaggccatataggtgcacatctggatgaagatacaagaaatagatatgtgtccaacattgtgtttggcgcactgcatagaacagaaatttaattaaataacttttagtatgggattattagacggaaaaacagccattgtaaccggtgctgctcgcggtattggtaaggctatcgctcttaagtttgctgccgaaggcgcaaacatcgcatttactgaccttgtcattgacgaaaatgcagaaaatacagcaaaggaacttgaagcaatgggcgtgaaagccaaaggttacgcttctaacgcggctaactttgaagatactgcaaaggtcgttgaagaaatccacaaggacttcggacggatcgatatattggtaaataatgccggtatcactcgtgacggtttgatgatgcgcatgagcgaacagcaatgggatatggtaatcaacgtgaacctgaagtcagcatttaacttcatccatgcttgtacacctatcatgatgcgtcaaaaagctggtagcattatcaatatggcctctgttgtaggtgttcacggaaatgcaggacaggctaactatgctgcttctaaggcaggtatgattgcattggctaagtctatcgcacaagagttgggttctcgcggcatccgtgccaacgctatcgctccgggattcatcctgacagacatgacagctgctctttctgacgaagtaagagctgaatgggcaaagaaaattcctttgcgtcgtggtggtactcctgaagatgtggcaaacatcgctaccttcctggcttctgatatgtcttcttatgtatcaggtcaggtgattcaggtagatggtggtatgaatatgtaatcgaacagaatgactgttgtatacgaagacaaccatatcattgtagtcaacaagaccgcttccgagattgtccaggcagacaagacgggggatacgccgctttcggagactgtgaaacagtatctgaaagagaagtatcagaaacccggaaatgttttcctcggtgtgacacatcggctggaccgccccgtaagcggtcttgttatttttgccaaaacgagtaaggcattaacaaggctcaacgaaatgtttcgcaccagtgaggtgaaaaagacttattgggcggttgtgaaaaatgctccgcaagaaccggaaggtgaactggtacattttcttgtacgtaatgaaaagcagaacaaaagttatgcatacgacaaagaagtgccgaacagcaagaaagcgatcttgcattaccggttgatcggtcattcggagaattactatttgctcgaagtcgatttaaaaaccggacgtcatcatcagattcgttgtcagctggcaaaaatgggatgccctatcaagggagatttgaaatatggctctccacgctccaatccggatgggagcatttgtctgcatgcccggagagtacggttcgtacatcctgtctcaaaagaactgatagagcttgaagctcctcttcccgaagggaatttatggaaaggattcgccatagattaacacggatttccacagattcatttattatgttatttagtagacggtacgcagtttttctgtggaaaaccgtgtaaatctgtggttggaacttgccaaaagagtaaacctgcctgccatttttcttgtaaactctagcgacagttagttaattcctaaataggtagtatatttgcatcattcgctaactataattttcaatcataccaaagaaaaatacgaatgaaggcatttaaactacttgcacttacttcttgtgtcttgcttgcagcgggaaatggagtagcgcaacagaactattcaaaaagtgaaggattattgcagtacgtcgatccgtatatcggatccggttatcatggacacgtctttgttgggacgagtgttccgtatggaatggtacagctgggtcctaccaatatccataaaggttgggactggtgctcgggttatcattattccgatagtattttaatcggcttttcacatacccatttgagcggtacgggctgtactgacttatgtgatattctcatcatgccattgaatgagatccgtactcccagaggcaatcaggatgatatacgtgatgggtatgcttccagatattctcatgcgaatgaaatcgcccgtcccgaatattactctttgcttctcgaccgttacaatatcaaagccgagctgacagctacagatcgtgtaggcttccatcgttatacttatcctgaaggaaaaccggcttccatattaatcgacttacgtgaaggaaacggatcgaatgcttacgacagctatatccgtaaggtagatgattatacagtagagggttatcgttatgtgagaggctggagtccttcccgcaaagtttattttgtgttgaaaagtgataagaagatagagcagtttactgcctatgatgataataacccgcaaccttgggaccaactgaaagtggcatcggtgaagagtgtcctcacttttggtaacgtgaaggaagtgaagataaaagtcgccctttcttctgtcagctgtgacaacgcagcgatgaacctgcaatccgaacttactcactgggattttgataaggtggtggatatgagtgccgaccgatggaataagcaactggagaagatgacagtagagactgatgatgaggcttccaaacgtgtattctataccgcccattatcatactatgattgcccctacgcttttttgcgatgtgaatggagagtatagagggatgaatgacatgatttacacagacccgaagaaagtcaactatacgactctttctttatgggatacctaccgtgcattaaatcctttgatgactattactcaacctgaaatggttgatcatgtagtcaattcgatgatttccatctatcgtcagcaggacaaactccctatctggcctttgatgagtggagagaccgatcagatgccggggtatagctccgtgccggtgattgccgatgcatatctgaaaggatttaccgggttcgatgcggaagaagcattgcaagcaatgatagctacagctacttatgaaaagcagaaaggagtaccttatgtagtcaaaaaaggctatatccctgccgacaaagttcatgaagctacttccatagccatggagtatgcagtagacgactggggaattgccgctatggcacgtaagatgggaaagacagaagatgctgaaacattctcaaaacgtgctcattattacaagaactattttgattcttctatccatttcattcgtccgaaactggaagacggctcttggcgtactccttacgatccggcacgttccatccatactgttggagatttctgtgaaggaaacggatggcaatatactttctttgctccacaagacccctatgggctgattgccttgtttggaggtgacaaatcttttacaacgaagcttgatggtttctttaccaataccgacagtatgggggaagaagcatcgagcgacataaccggattgatcggacaatatgcacatggaaatgaaccgagccatcatgttgcttatctttacgcgtatgccggtgaacaatggaaaacggcggaaaaggttcgttttatcatgagcgatttttacacagaccagccggacggtatcatcggtaatgaggattgtggccaaatgtctgcctggtatcttctttcatctatgggactctatcaggtgaacccgtcggatggtgtatttgttttcggtagcccttgttttaagaaagtagaagtgaaggtacgtggtggtaacacttttactgtagaagcacccaataacagcaaagaaaatatctatatccagaaagtgtatttgaatggcaagccttatgataagagttatatcacttatcaggatataataaatggcagcacattgaagtttgtaatggggaaaaagcctaataagaattttggtaaggctccggcaaacagaccggttgttttgaataagataaatggataaagatggcttacttataaaagacagctaattgttgaaaggaggaagaagcctccgacaatgaaagaataaagctggttctcaatattcaattcagttttcaataggtattataaggctttccgattgtagcatttaattctgcttcggaaagctttattttatactagaaacggctgaaaagcaaatccttaacaaggacttactgttttcagccgttttggggaatatagttttaagaaataagttagtcctgattacatctttcctttaaaaaagaatgtaatcaagactatttttataactatggaagcggatcagcttttgccggtcgtttcggatcataaacggctactcctactttggagtcagcacaaccataatacaaataccatttgtttttgaagtagaccattccttctataaatacggttccatccacatattgcccactcttttcaaagctatccatcggacggaagaacggttcatcgagacgggtgataaagcgggtaggatcattggcgtcgaagagtgcttgtccggcagcatagacattggcggtatagcgtttgtcacctcttcctgaatggttcttaccattataaagaaggacaattcctttcggagtgtagatagccggaggcccacattcggtgagatggctgtcgaagtagccgtcacggggagaaaacagcttttttagggaaccgtcaatgttgacaatcggtgtccagtggattaagtcatcggaagtagctgcgaatacatgctcctctccccagtacataaagtatttcccgttgattttcttgataacctgtttccctttaacaacttcggtcaggatagagccggacttacaacccaggttgaagaactttccatcaaatgctttggcaaaagcaggaccgtgttttgtccagtcttttaggttgcgggaggtcgctactgccaggcgaggtacatggcgattccattgggtgtacatcattacatataatccgtcatcggttacggcaattcgtgggtcttcgcagccgccgggccattccaactctttttgtgaatcattatccggatagaatacaggagtcttttcccgttggaaatgtgtgccgtcggtagaagtggcataaccgaggcgagaagtcctgtgtccgataccgacacctgatttatcctctgcacggtataacacgacaatctcaccattgtagagtgtagcagccggattgaatgtatcgttcgattcccacgcaatagaatctttggtcaatggacagtaaaacttggtgttttctataggagatattaccggattgacattctttggacgttcaaaaccaccgaaagcccaatcgggtaatttgttctctttatgattggaagactgtccgtaggcagtacaggtcatcatggttgtagtaagtaggaataaaaaagttgatttcatattgttcatattatatgggtcatttattttttaggagtcatatactccctacatataaattggaaaataaataaaatgctgtcatctgtcacctgattgggcataaatgattgattataaatatactgcagtgtgacagcatgatgtgacggcaaggtgacgacaactttgctgtcaccttgttgaaagtaaggattttattgcttctctgctatgtgggcacttatttttctatccggagcggtattcaaggattatcagactattacggaagagagagtttcagtacttgaaactaaaagttctattgcttgaaacttttgtttcgtcagcgggaaactttagtttcatcggtgagaaactctagtttctcttacttgaaactatggtttcaaaggcgtgaaactaaagttcttcaaccttgaaactactttggaagcgtaagcttcaaggttagaaacagttatctcataagcgggaatacaataaaaacataatagaagactattggatactattcagcaagtctacctttccttcattcacgagttttaggattagttctccgaacagcgtattttgccatgcaaaccaggaacgagtaaagtttttcgggtcgttcttgtggaaagattcatgcatgaaccctgttccggcatccgtatccatcagcattttgatacaggtcttgatttctgcgtcgttttgactggtgaatgctttcatcataatactcatgggccaaatcatatcatatccgatgtgcggaccgccaattccttcaccggcagtacctttgaagaagtaaggattatcttcgctccatacaaacttacgggtattctgataaataggatcgttcactttcacatccccaagataaggcagggcaatgagactcggcacattggcatcatccattaacagttgattgccgaaaccgtccacttcgaaagcatagattttgccatatttcggatgattgtaaaccgcatattttttcagggctgcttccacttcgttcgacagtgtagtacattctttagctaaatcaggtttcttgttgactgtattcagaatttcggcagctttgcgcaatgaagttacagcaaagaagttggatggaacgaggaactggaaagttgtagcatcatccgaaggacggaaagcagaagcaatcagtccgaccggctttacaggattaccccagccgtcgttggtcatcgtatcgagtgcacgttccgttttacgttggaaacgataaggacctttcggatcttcttttcgttgctgttccttaaacgttttcagaaccttggcgatggctgtaagccattcgtcggagaatatactggcatctcccgtcgtcttccagtaatgataagcgagacggataggataacagagcgagtcgatttcccatttgcgttcgtgcagttcgggcttcatgtccgtaaggtcactcatccattcgccgccttcggaattcatgttgaaagcattggcatacgggtcgatattgatacacttgaactgacgtttgataacgccggcgagcatttttttcagttctgcgtctttgttggcgagttgcacgtaagaccatacttgtgcacccgaatcgcgcaaccacatggcgtggatgtcacctgtataaacaaacgtatcgtctttaccgtcaaaatgaacagtagtatccagtgtgttcgggaaacagttttcgaacatccatgccaagcggacattcgtcagcagttgcttgatatgcgcaatctgttgttccacagcttgtgagacaaacagacgtttcgatgcctccggacggttcgtctgatagttgttgattttggtattatcttgttggatgacaaaatcactgttcgttatagcctgcatattgctagcaccaaagagtgctatggacaaacaaaaggctttagttatattcatggtaatagtctttttttgttgattagtattgattatgaaagtgttgcggagaagaagtgttaaatctctgcaaagaattcaataagacaggcattgtcgagcagccatttatactgctccttgttatgtcccgaccaatccctgcctaataatccgttttcatcccggtagttttcccaggcgtgaagcgcattttccaccatcgcattgacatacgccggattcttgtcaatcttatacagagctttcagtcctctgaataagatcacgttaaaccaggccatgtctttatgcactttgacagtcgggtctttcttgtcggcttttgtgcggaaaaaagcatcagttcctgcggctgtctgctgtgcatcgcgcaaatactgttcatctcccgtttcctcatagagcaatacacccgcctgaatcatctgtccactgttgtaggcgtacttctctttggaaactttccctttcaggttgatgttatcccagtaaagatggtcggtagggtcgcacagatgctttttcgtccaggcatacgtctcttttgctttttcgaggtatttggcatccttcgtcagccggtacaacttgacaccgagcacagtagacggtgcattggaacaagtatgcttcgcttccttctgctgttcacaccaaaagatgccaccgcctatctcatcgctccatccactgtagatatattgatacaatgcaacggctttttccaaagatgcaggcttgtgagtcagttggtaataatcgcagtaatccagtgcaatccagatgttatcgtcataataacgtccgtgctgcccgtacttggtggggtatgactgataacaggccggcaagcgactgttatcccaatactgctccattcccggtagaattcttttctcgagaatctttttgtacttcttgtttccggtcgctttgtataaagccacacaacccgacatcatcccggaatacggccatagaaaagaagccttcagcgttccgttctgctgcgttccgcccgccagataagtaattttttggtcgggattgacaggatacgtttctgttagtagtccgtcattcgtctgatagagattcaatacattagatagaattgagtcggcaatagaaagataacgggtatttcccggtgtctttcccactgcggaggtaaggcaaaataacatacaggctacaaaacatatatttctcataggaatatcgggttgtgtggtgaaactttcaggttataactagatacaaagattatttctgctgacgctggtcgaactccagttccacctttacggggaaatggtctgaaggagtgcgcgcctgataagccttgatgtcgatttcttccgggcaatcgttcgcctgcttcttttctcccttgcctacgatgctgcggtaagtatcagtcagcacaccatatcttttcacttggaaagacggagaaacgaatatatggtcgatacggctttccgtaaagctgttcgggtcgaagtcgttgaacgtgccgttgatagcatagcggaagccggccttctcgtaagagtcgcacaacacccctttgctcacaaaagcatcataagactggtgggtctggtcgacattgaagtctcccgtcaggatggccggaagctctttgcctttgccaagttctttcatcttgtcctgtacgaggaatgcactttccacacgtgccttcttgccgatatggtccatgtgcaggttgaagaaaaggaattcgaagccggtatctttgcatttgaagtgtccccaactgcaaatacgcggcaacacggcatcccatcctttgctcggcacgtcgggagtttccgacaaccaaaaatcacctttctctatcacgtcaaacttgtctgtgcgatagaaaatagcagaatgttcacctttctctttgccgtcgtcgcgacctacaccgatataatcataaccgggtaatgcctcttttatatctttcagttgatgaataaagcactcctgcgtgccgaaaatatcgaaatcgtggtattgcactatttgggcaatgaccgggtaacgttgtccccaaccgtttccgttgattgaatcgccaccgttggcgtttctcaaattgtaggaggcaacggtgatagaagtaggctgatagttactttgacaaccgcaaaagacgatcgcaacaagggcaattagtaaaaggtttttcagtttcatgtttttatagtttgtttggtagataattcattgatctccaaaagtacaatattttattcaaacgaaagagagtaaggtacatctttttctgtggttccccgttgtttattgggtacggggctcatttgaaattgaatattagcacctttaatcagctggtcatgtgtaaggaaattacgggtttgtgatttcccgtttactttcatttccttgatgtagcggttgtcaagctggttgttatctgccttgattgtgatggtctttccgttctccagatgtaacttcgctgatttgaaaagcggggttcctatgatatattcatccgttcccgggcaaaccggatagaaaccgagtgcggagaatacataccaggcggaagtctgtccgttgtcttcgtcaccgcaataaccgtcgggaccggcggtatatagcttgttcataatctcacgtatccagtattgggctttccagggctcgctcgaatagttgtagagatataccatgtgctgaataggctggttgccgtgcgcatattgccccatgttcattacttgcatttcacgcatttcgtgaatcatgccgcggctttccattcccagtttacccgggatgacaaagacggaatccatcatcgcgttgaattctttcttgcctcccatcaggttgataagtccttgcgggtcgtggaatacgcagaagctccagtgccagctattcccttcgcaaaattcaccgctccagtccactgcatcgaaattcggattgaatacgcctttgttgtctttgccaaccatcagtttgcgttccgggtgatagacatttttgtagttcagcgcgtgtttcttataaatgtcgatttcgctctccggtttaccgagtttcttgcctaatgtataaattgcccagtcgttgtaagcatactccaatgtacgtgcaacgttttgtcctatgccgatattgttggcaacatatcccagttggttgtaagattcgtaaccgagacgacctgaagcagtcccgcgaagatgtgcatttgctccatgtttcaatgcttcccaaagagtttcgatatcatatcctcgcaatcctttgatgtaagcgtcggccactacggaagccgagttgttgcctaccatacaatcccgatgtcccgggctggcccattccggcaggaaaccgctttccttgtaagtatttactagtccctcctgcatcttttgattcattgacggatacatcaggttgaggaaagggaacaagcagcggaacgtgtcccagaatccggtgtcggtaaacatataaccgggacgcacttcgccgttgtaggggctgtaatgcatgacttgtcccttagcatctatctcgtagaaactgcgtggaaaaagcatggaacggtataaacaggaatagaaggtgcgtaaattatcgatattatcgtcttctatctctattttactcatttcacggttccaaatctctcttccgttcgctaccagttggtcgaaactgtttttgccaagctctttgagattcaactccgcctgttcggggctgataaaggaggaagcaacacgtgcgtgtacgatttctccctttttcgtggcgaatccgatcacggcccctgtgtggtttccttttgcttctgtttcattcggaagaatgttgttttcgaaaactgtggaaacgaatgtgaacggtttgtcgaattgaatcacgaaatagtttttgaagttttccggcacaccgccgctattcttggttgaatagccgataatcttgttttcttccggaatcactttcacataagaacctttgtcgaaagcgtctacaatcacgtaggcattctttgtctccggatacgtgaaacggaacatgacggcacgctccgtaggagcaagctcggttgttacatcatggtcggcaaggtataccttataataataaggtttggcaacttccgctttgtgagagaaccaactggcacgtcggtcttgatcgaataccagtccgccggtgataggcatgatggcaaactgcccgtagtcgttcatccagggactgggctgatgtgtttgtttgaatccccggattttgtcggcatcatacgtgtacgcccaaccgtctcccattttaccggtctgcggtgtccagaaattcattccccacggcaatgccgtagccggatacgtgtttccggtagacagttcaaacttggattgagtgcccaccagtgtgctgacatagtctaccggattcttaacggcagaagattgcaggctgtacaacacggcacctccaagaaatagcaagtgtttaaatgaaaaatgtgttttcatgaacaaatgaatttattgatttgaaaataatttctacgacgaaaatagggagaaaaggaatgtgcttctagtaatagaggggctaaatcgcctcttgtcgctgaaattaactactctggcacggagctttacttatattccggccaaaaaaaagctcggaatgtttttttgtttacctttgtcatatagcaaatctaagaataatacactatgggaaaacagttggtttttattctattcttttttcttaatctgttgatacataacgcttatgcttataatttgaagcaagttgcagataaagagtatatgtctaatagttcgattacatctctgtgccaggatgaacgtggattgatgtggatcgggacctgcgacgggctgaatatttatgatggacaggagattgaggaatttaagactcgtgacaaggaggattacttatctggtaatctgattgacaatattgtgtatacgggcgaagatgtttactggattcaaacctactatgggctgaaccgtttgaaccggaaaaccaatacaatcactcactataatgaatttcagaaactcttctttatgaataaggatagtcatggtaatctgttcattatccaggatagtaactgcatttattattatcataaaaaagaaggagtcttcaagaaaatcaatatcacgggaatcccgatttccgatatcgtaaacttctttatcgacggtaacaaccggatgtgggtagtcatgaaaggatataaccgctgttatgatatacagcaggaagccgcatcgggagatatcaccctgttaccccagaaaacgaacctgatttatcagacttccttgatttattgtttcaatgacgagcaatctctttattacatagacaaggaatttaatttctatgctttccatattccgacccagaagaatgagtttattgccaatctaggtaaagaaatacaggaacgtggtaaaatttcttccatcgttcattatcataacagctattttgtgggctttttgatggatggtattctgctgttggagaaacagaaggagacgaatcattatcaaattcagtcgttacctatcaacagcggtgtattctgtctcaagaaagaccgttttcaggatgttgtttggattggtaccgacgggcagggtgtttatctttattcgaacccgctttattctatcaaatcaatggtgcttagcaattataccgagaaaatagaacgccccgtgcgtgccatctatcttgatgatgaacgtactttctgggtgggaaccaaaggaaacggaattcttaaaatctatgattacgaattcgataaaaacatctccgactgtcgggcggaggtgttgactacctctaatagtgctttgagtagtaatgccgtttattgttttgccaagagccaccggaatttgctttggataggagacgaagaaggattaacttattattcatatcgggaaaaacgtatcaagagtataccaatacggatcggtaacgaagatttcaaatacatccatgacatttacgaaacagcagattccgaactgtggctggcgagtgtcggcatgggagtggtgaaagctcgtattgccggaacaccggacaatccggtgattgtggatgcgcaacgttacatcatcaatgacggcgaactgggatcgaactatttctttactatttatgcggagaatgaagccaacctgttgtttggcaataaaggatatggggtattccgctataacgaaacgacgaatggcctggaaccggtgtctactcacaaatacgaaaacatgaccctgaataatattctcgctatcagtaaagacagcagcaataactatcttttcggaacgagctacggattgataaagtacacatcggaaacctcttatcagctcttcaatgccaagaatggtttcctgaataataccattcatgcaattcttagaaactcgtccgacaacttctggttgagcaccaatctcggattaatcaatttcgatacgaaaaggaatgtctttcgttcgtatggctttggagatggtttaaaagtggtagagtttagtgacggtgccgcttttcgggattcccggactggtactctgttctttggcggaatcaatggagtcgtagctatccgggcggatggccgtccggagcagctttatatgcctcctgtttattttgataagctgtctatcttcggtgaacaatacaatctgggcgaatttctcacccggaaaaaagaaactgaagtcttgaatttgcagtatgaccagaatttcttttctgtttcatttgcctctgtggattatctgaatggtaataactgtacctatttctataaactgaaaggattgagtgaccaatgggtaaacaatggttcggaaagcggagtctcttttacgaatatggctcccggcgaatataccttactggtgaaatattacaatagtgtctttgataaagagagtgatgtctattctctggtgattcgtataggtgatccgtggtatgcttcctggtgggcttatttgatttatgccctgtgtctgcttttactggcagccttgctgatacgttcctttatcctgcgctccaaacgtaaaaagcaggaattgctgaacgagatagagaaacgccatcaaaagaatgtctttgagtccaaacttcgtttctttactaatatcgcacatgaattttgtactccgctgactttgatttatggtccttgcggacgaatcctttcatcgaagggacttagtaaatttgtcgtggactacgtacagatgattcagacgaatgcggagcgtctcaacaacctgattcatgagttgatcgaatttcgtcggattgaaacgggaaacagggaagtgcgggttgaatcattgaatgtgtcttccattgtgaaaggaatagccaaaacgtttgttgaaatggctaaatccagaaacatcactttcttgagcaagatacccgagcaggtgatgtggaactcggacaaagggtttctgaatacgattattattaatctgatttctaatgcctttaaatatactcccgacggacaaagtatcaagattgaagtggatacgagcggggaaaacatgctgactcttcgtgtagcgaatgaaggaagtaccatcaaggaaaaggattttcagtatatttttaatcggtatgccattttggataatttcgagaatcaggatgaaaagaacttttcacggaacggactggggctagccatctcttataatatggcaaagttgctgaatggtacgttgaaagtggaaaatactcctgacggatgggtgatgtttacactaaccttgccggtcgtggaactgactaccggagtggtggaaaccaagcggctcacagcggaatacatccctaagatagatactcaatcgatactgaaacttccccagtatgagtttgataagatgcgtcctacgcttttggttgtcgatgatgaaatcgaaatgctatggtttattggagaaatcttctcggctgacttcaatgtggtaaccttgcaagatcctgaacggctggatcaggtgatgaatgaggtttatccgaatgtgattatctgtgatgtcatgatgccgggaatgggtggcattgaactgaccaggcggattaaatcggtgaaagagacggcgcatattcctattattgtggtttccggacgacacgagatggaacaacagatggaagccctttctgccggtgcggaaatgtatatcacaaaaccgtttagtgcggagtatcttcgtatctctgtctgtcaggtgatagaacggaaagaggtgttgaaaaattatttcagttcgccgatcagttcttttgaaaagtcggacgggaagttgacgcataaagagtcgaagaagttcctacagtcggttttgaagattatcaatgataatataacgaacaaagatttgactccacgttatatcgccgatcggctggcaatcagtccccggagtctttatcggaagatggaagagataggagaggatagcccgaccgatctgattaaggaatgtcgtttgcacatagcgaaagatttattgctgaccactaaaaagacgattgatgaaattgtattcgattcgggattctcgaacaaagttactttctttaaggtgttccgtgaaaagtatgagtgcacgccaaaagagtttcggatgaaacatttggaagaggttcagcagtagcctgtggcgggaatttttaaagaaaaagaagaagtaaatatccgtgttaatatagtaaatatccgtgccaaaaggtaaaaaaggatagttaattttcttttggtagagtttagtgattttatctttgtctcatcgaagtttttgagtagataaacttgaaaagtattaatttattaatctttaatctaatgaaaaggaaacttagttttttatttctttcagcattgaccattccattttttatggtatcgtgcagtgatgataaagaagaacaggaagtgaaaccggcaacagatctggttgtcgataataattcggtgacactactacaaggagacgaaattacggtgagtatcacctccggtaatggcgattattatgtgaagccatttgatgaaaacgtggcgacggctacaatcaatggtaataaggtgactattaaagctaccgaaaatagccagttggaagaaaataaccgtacggaaaccactatattaatagtagatggacgtaagaaagtggctagagtgctggttcgggtagcaaaactctgggatttgacggtagatgcaccggaagaaggttttgacctttttatcggtgaaaagagactggtgaagattttgaccggtaacggagattatcagatttccataccggaaggtgctgataagtttttggaagtgggtgaactatccggacaagttattccgttgactgccaagttcgagactggagccgatccggtaaatattacgataacagataagaaaggtaagacaatcactattcctgtggtagtgaacatcgtggatctgacactgaaaagtgatgaagccacttttgccgaaccggatgccgaatctcaatatatctctattgagagaggtaatggcggatatagtttcgcttatcaggtgggagacggcgagcctactacggatgcaacgattgtggaagctactgaaaaagagaacctgattaccttgaaacccaaagctagaggtgatgtgaaagtgattgtgacagatcagaaaggttctgtggaggagatttcggtgaaagtgaatccatataaccttaaactggaaaatgaagcaacttctttaatcatcggtggttatgaggcatctacagaaatagctattaccagaggaaatggtgattataagttggcacaactcacagatgataataaaacctatttgaaaaccgcagaattgattacggaagacggggctaccaagttaaaactaacaggaaagaagctcgggactaccacactggaactgtctgatgcggcaggtcagaaattgacgttaccagtttatgtgaatccggtatgttatcgtatggaatatgacgtatgctttaaaattgatattaaaaagtatgccgaatcacattcagaggtgaaaagtatgaatcagcttacttttgaggttgtgttctacccgacttatactcgttctatgcaatcgtttataggtttggaaagtgtattcctgcttcgtgcagaagctaaggatgtgaatccgcgttttgaaatagccactaaaattaatggtaagagtgatccccgtttccgtagtcagcaaactatttattgcgatgattcggaaggtggacgtaagactccaggtaaatggtatcatatagccattgtatatgatggaacgaaatcaagtactaaagaggcttataaaatgtatataaacggggtgagagaaacgttgactcctgcagataactcttatgaggattgtgcccctaattcatctctcaatctgacagatgtaggtggaaatgataaagcactgttgattggacgttccggagattcatatcgggtaggatattgcaaagtttatcaggcacggatgtggaagagagcgttggacgaaagtgaaattaaagcgaatatgtgcaaaatccttaatgcagaagaacactctgacttgatgggatattgggtattctcgaaaggtgtcggaggtactacagtttttgaaaattggggaaatggcggcagcggattggatgcgcaagtttgtttgcagaatataagcgaaaataaacctgcctggggagcggaacttcctgcaacttataatggagataagagccgctttgaaccaattgaatgtcctcattcatactaaaactaggaatataataatatgagaaacaatatgataacaaaaaaactaatcaaatttgccctgctgttttttcttatcggactgacggcttgtgacaataaactgaatccgggatttgatccggatgattatgaaccgattgttccgcctgaacctgttagaacaatggatgcaatggctagtggcgagcgagtagtactttcgggtgcttcgttgacggatattgttctgaaatggacgcctaccgagaaacacggaaatacagtatatcgttatgaagtattgattgatacgatcgggggagactttaccaaaccggtagaaacgatcttttctgacaataacggtttggaatcacagttgactttaacccattatcaggcaaacacaataggtaaactggctaaattccgttgcaataccaacggcacactgcgttggaaggtgcgtgcttattgcggattggatcaggctcttagtagtctggaaggttatttcgtaatttttatgatggacggcattgatgatatgccttctgaaaacgagccggtttatatcactggcgtgggcacggaagatgatggtgatgaagcggaagcacaacaaatgctccgtcagaatgaaggaatctatcagactttcactcaattgaaagccgaccagccatttatatttatgtctactgtagaaggtcgcaaatgctattattatgtagacgacaacggagtgttgcgtgagcgtaatgatggtgaagactatacagttacggttcctcaatcaggcatctaccggattaccatcaatatgggtgaacaaacgatcagttacgatgaaataggagctgtatatctttataaccattcgggtgggtatagacaggatttcaactatctgggatatggcaaatggggtgtgaagaattatactgcccggaaacaaacggaaagttgggcaggaagcggtgaaacccgtcatagctttaagatggaaatcaacggaacaacctaccgttggggacataaggagaaagataaagggcaaccgaatctgactaccgacaacagctattataatttatatcaactggcattgggcacagatccatgggattacagtttccgtttctgcgacgaattactgcaatggggcgaaaagcagggaaatgtctattatgctacggtgaaaaccgatgtaaccctctatttcaatgcagagtttggaacgtacacccaccgttgggtagcttcggaaacgaatgaagattaaaactgaataataatatgaagaactatatagtatcattatcaaaaagagctttgttgttaagcggtgcactggcaatatttacagcttgtgacgacggcgatctgggagacatctacaaaggtaattcatccggtgaatatgtgtcggatgtgaactggacagatgcagccgacaaaagtacgggaacttatatcaaatatttctatgagaatgccagcggacgggataccttttgcggaagcatttactgggaaaaaccgaatacaccggaaaccggagaaccggcaagcacgggcggtagcggcggatggtcgcagggacatgcattggacatcgtgatcgatgcttatatccgtcacgcaaacaatcccgaatatcaagctcatttgtatgaaaacatcatgaaacctttcctgccggcttttgatgactggaatgaacattgcggttatggtggcaaagacttctggaataacttctatgatgatatggaatggatggcactgtcttgtctgcgggtttatgaattgactggcgatcaggattactacagtgcgttgatgaagatgtggaaccatatcaagggagcgaagaatgactataaaggggtaggaggaatggcatggaaaacggatgcgccggcttcacgtatgtcttgttccaatggtcccggttgccttctggctatgaaattgtatcaacttaccgttaaggaggctaaagatggctgggaagagcaggctgcttattacctgaacttcgccaaagaggtatacaactggatgacggcttatctgtgtgatatttccaccggacaggtatatgataatcttagtattaaagatgacggaacaccgggagatcctgataaagtagccttgtcttataatcagggaacatttatggcggctgccctggagctgtacaacgctaccggtgaggatgaatatcttcgtaatgcggttgctttcggctcttaccaggtgaataagaagatggattccaactatccggtattcagtggtgaaggaaattcgggagataatcttttattccgtggaatatttgtccgttacttcctggatatggtgaaacagccgactaacagcctttatccggaaaagaccaagaataagtttatcgctgcattgcgcagctgttctgatgtgctttggacgttggctcatcccgaaggctattatgtgtgggagtacgattgggcaaaagcaccgaccttcggtaatcgtgacaacagggaagatcgcctgacaatctccttgaatgcggaagtcccgggagcaacaatgattgaaatccgtgctcgttatgaagactgggtgcaaggtaaagcaacggaaaaggccaactgggtcggaccggatttcggtaagaaagcagaggaataagattgatttattacacatagaaaatcgaaaagaaagatgatacatataaaaagaaatatttgtctggtggctgtttcttgcactcttcttgcaggtatacctttgcagggtgtggcgcaaacgggaagaacggcaaaggtgcaggccacacaaagtaataaaataacagtgtcgggtacggtattggacaagacgacaaatgacccgttgatcggtgtgtctgttgtcgtgaaaggggtggccaatgcaggtacgattaccgatatggatggtaagtttacattgaagctgccttatgcggaagctccgttggtgttttcttacctgggttaccagccacaggaaattgttcccggtgcaaagaaggaactgactgtcttactacaggaagatacgaaagccttgcaggaagtggttgtggtaggttataccaaacaacgtaaagaaacgatgatcggttctgttgctaccatcacgacaaaagatctgacgcaaagtcctactgccaatatcaacaatgcgcttgccggacgtctgccggggttgattgtaaaccagtatgcgggtggtgaaccgggtgtggatcaaagtgaattgtttatccgtggtaaggcaacttacggtaaccagagtgccattgtcattgtcgatggaatcgaacgtgacatgagttacctcgcaccggatgaaattgaaacattcactatcctgaaagatgcttcggccactgccgcttatggtatccgtggtgcaaatggtgtaatcgttattactaccaaacgtggtaaggcagcggaaaaggcaaccgtgaacctgaaagcctctatcggtattaaccagccgatcggtttccccgaatatttaggctctgccgattatgcaactttatataatgaagccagattgaacgatgccaagatgacgggcgcagacatcagcagtttgaaccttttctctcaacaggcgattgacaatttccgccgtgcgaaaggagacaattccgatggtttgggatatgactgggattattatgattttgccttcaaacccggtttgcaggaagatgtcagcctctccattcgtggaggtacggacaaggtacgttattatgtactggccaattacttttcacaaggaggtaactacaaatatgcgaatgccggtgaatatgattcacagactaaattcacccgttacaatttccgttcgaacatcgatattaacattaatcgttatttgagcacccgtctggatttgggtgctcgtattaccgaccgtaatgcaccgggtacaacagccggtcgcctgatgaccatctgtgctacccagcctccatatttgcccatcctggtggaagaaaacgcgcatccgcagaatgaggaatacattcagcaaaactctcgtggaatgctttatggtgacaatatctaccgttacaatcttctgggtgaattgagccgtaccggttatctgaatgaaaagaacacgtatctgaatggtagttttgccatgaatctggatatggaatttctgacgaaaggattaaaagcggaagtgatgttctcttatgatgcttctgaaggacgctggattaatcgtaaactggatacttacaaagacggttatcgtgaatatccgaaatatgcgacgtttatgccgatcgaaggttcggatgcttatatggcaggcggacactatacgggtgcttacaaaacgggtaacaaatatgatattgaccagactattggcaacggattcagtcataacgcttctgacggacgtacttatatacaggcacgtttggattacaaccgtttgtttagcaaccgccacgaagtgaccgccatgttattggcaaaccgtggtaaccgtactgttaacaatgaactggcttatcatagccagggtatcaccggacgctttgcttattattataatcagaagtatctgatggaatttaacttcggttacaatggttccgaaaacttcgctccgggcaaacgttacgggttcttcccagctggttcaatcggttgggtagtctctgaagaggaatttatgaaaaaggcttcctggattgacttcctgaaagtaagagcctcctatggtttggtaggtagtgacaacgttagcagccgtttcccatatctggctttctacggtggtggcagcggttatgatttcggtaataactttggtacgaatgtaggcggtacttccgaaggtaatctggctaatgcgaatctgacttgggagaaagcccgtaaactgaatgtcggtatcgactttactaccctgaaccaacgtttggcattgacgatagatgcattttatgaatatcgttttgacattattacagatatgaatagtgacggtatcatgggatatccggatattgtaggtaaagatgcagctttacagaatctgggtgaagtaagcaaccgcggtgtggatatcgaattgagctggaatgataagattggaaaggatttccgttactatattcgtccgaacctgactttctcccgcaaccgtttggaatataaagcggaagttgcccgcaagaactcctggcgtaaagaaaccggtaaacgcttatacgaaaacttcgtctatgtgttcgatcattttgtagccgatcaggaagaggctgaccgtttgaacaagatcggttatcagccgtggggacaattaattccgggagatgttgtttataaggatttggatcgtaacggagtgattgatgatgaagaccgtacagcaatgggaaatccgcgtagtccggaactgatgttcggtattcctttcggtttccagtataagaactttgattttagtgtattattgcaaggtgcgacaaaatcatctattctgttgaatggggctgctgtatttgacttcccgcaatttgaacaagataagatcggacgtgtgaagaaaatgcatctggaccgttggacaccggaaacggctgctactgccaaatatccggcattgcattatggaacacatgataacaacaagaatggaaacagtagtttgtttttgtatgatgcttcctacctgcgtcttaagaatgtggaaattggttacaatgtatcacccaaattattacgtaaattccatgtgcaacaggcacgtatctatgtgcaaggtctgaatctgttgacttttgataaactgggtgatgtggatatagatccggaaacgaaatccggagacggagcttcctggtatcctattcaaaaggtattcaattttggtattgatataacattctaaataagatagaaatatgaaaaagttatatagattttcagcaattgctttattggtcctgccgttggtctttacttcatgtagcgattacctggatcgggacgatgatgataatattacggaagcggacgtttttgcccgttacgaaaaagtgaacggactggtttccgacgtatacgcggctgcaaagaaagcagaccgtccgctggtgttcttcgagcacttcagcaacagtgccattacggacgaatgtgaaggaaccaacgtagagggaaacattacgaataacttcaataacggtgcctggaacccgaattctttgcccggtagtgtagggcaatattgggaagctctttatgaaggaatccgtaaagcgaacctgattatagaaaatgtacagaagtataacacgcccgacaacccacagcaggatggtgatcttcgcaaccgtatcggtgagatgtatttcatgcgtggttatttccacatgctgttattgcgtatgtatggcgaagctccttatattgaccgtgtgattaatgccggagataatatggacttcaagaaagaatctgttcattcgatggttgaaaagattgtgacagatgcgcaaactgcttatggcatggttcctaataaatatgtgaaaacttccgagaattttggtcgtgtggataagggagcctgtctgggattgatttcttttgttcgctgggtagcggctactccgttgtggaacggtgcttctcaatatggatacaacttgcgtcgtgtgtttgaaaatgagtatgcttatgatgctactcgttggagaaaagccaaagaagcggctaaagccgttctggatttcgaagtcggcggaaccaagcgttattctctctatacgaaacatgatgcaaatgatttcaaggatccggctgacggtaatctgaatgacagccgtgtatatgctcgtttgtgggatatgttttatgatatggatgcctttgccaatgagtatgtgttctttatgacgaagagcaaggatcaggcatggcagggtgatatttatccgcccagccgtgagggaagttcgcgccagcaaccggtgcaggaacaagtggatgaatacgaatatatcgtaggtgattatggctatccggtatattcggcagaagcccgcaaaggtggctatgatgatactaatccgtatgtgaaaggtactcgggacccgcgtttctatcgtgatgtaatttatcacggagctccttaccgtaataataagaacgagtcgaaaacgatcaatacggcgagtggttccgataagattggtgctaccaatgcaactactaccggttattatttacgtaaattccaacaggagtcatggaacaaatccggtaacttcagtatcaatgcgcccgccatctggcgtcttccggagtttatttatatttatgcagaggcttgtaatgaattgggcgaggatatcgatgaagcttataaattggtgaatacggttcgtgaacgttcttttatgaaaccgatgccgccggaagtaaagactaatcaacagttgatgcgtgaatacattcagcgcgaacgtcgcgtggaacttttttatgaaggaaaacgtccgtggacttgccgcttgtatctggaacccaccagtaaggaagagctagcaaaggaaagcctttggaaatcgagcgggagtgacaattcaaaacgtacacagaaatactgggctgccaataacggtgcattgccccgttgccagcgaatgattaacggaatgcgtccggtgcaggatgagaatggggccattacggttgacggtgtgaaatatagaatggagcgtttctgcgtggaagaacgtacgttctctattcagcattatctgttcccgattcgccagagtgagttgcagaagacaccgaccattgaacaaaatcccggatggtaaaccggtaggaatgtataactttaaaaagaaaatcagatgaaacgaatctatacatatatgtgtctgttgcttttgtcggtattatcgtttgccgttacaggttgtgatgacgatgatgatgacgatgtggctaaagacttgatagagttgattgtgaacaaaccggtaatacgtatcgggcagaatgaggaagccaaagtgaatgtagtggttggaaacggaaactataccgtgagaagtttcaacactgccattgcaacggctaccgtttccggcgaattgataactgtaaaaagtggctcacagaatggggccactaccgtcgaagtaatggatggagaaggagtagttgccaatatttctgtgaatgtaggtgtatttgaattggaagtgaatgaaccggaggtgatcttggaagttgccggtgaaaagcaactgattgtcagcatgggaaacttttccagcaatgatgaattgtcttatgaggtggaggatgaaacggttgtcagcatggttaatacagatcagttccgtcctttctatactttgacaggtttgaagaacggacatacaacagtgacttttacagaccataaaggaaaacaggcggtggttcaggtgacggtaaatccgatttctatcgatgtctccaatctgacaccgagagtgggagtcaacaataagatcatgattacggtagaaaaaggaaacggaggttatagtctgacagcagagaatgaagagattgtagctattcagcaggtggatgacactcgtttcaatttaataggtaaaaaagcgggtatcactaccgtgtttgtcagagacgaagcggaacaggaattaagtctgaccgttacggtggtacaggcagataaagtagcgaacctgggtagcggtaattactttaaagtaccgtttgaatataatggtacggcagatgaatcgctaaagaatttgagtacgatcacatttgaggctcgtttcaatattgagtcgttgaatggcaatgacaatggaaatgcccggattaatacggtgatgggtatagagaagaaattcctgctgcgtgtcgacgtgcataagggaggaagcaatgatgaagaacgtttccttcagcttgctgcagatgataaaggtagtattcgctatgagggctctactaagatagaaaccaataagtggtatgatgtggctgtggtattggataatagtaagagcggaagcgaacggattgcattgtatgtaaatggtgtcagagaaacgcttcaattatcaaacggtacgccggatgatttgaaagagatcaatcttacttctgatttctacatcggccagtctgatggtaaacgccggttgaacggagctatcagttatgcccgtatttggacaaaagccttgtcggatcaacagatctccgagcagagcggcaagttgttgagtgaggataaggatggaatggtagctaattggttattcaataatggaaatggtaataccaagacatttgtgtccttggcaggaaagagcttcgaagcagaggcggcaaatattgtttcaagttggaaaacagatccgatattggaaacaagtactcctacggaataattgtaagaagataggataataaaaaagccatccccggaatagacgaaagtagggatggctttttttgtagtgtgcttactattcttcggcagactatgtcctgcatgttgttggcaaggttattccttgacaggctcagccggtttgtcttttgatgtagtgtctgtgacaactgtatcattgacattggcggcgagtgcaaccagtgatgcctttgcaggcgcgtcttctttagttacagtatcttttactactgtatcattgacaactgttgcattgatttctgtcggggctgtcacagcttctgcagaactctgagcctttacaaggaatgaaccaccacaaacaaacataaacattgctactactaatactaattttttcataatcgtttgctttaatgattattagacatatgttttcaattctctacctttgtgttaaggaatcggttattacttttcgctaacgtctaattaaagatcaaagcgcgtgccaaaattagataatgtatgataagtgattgataaatagggaaatgataaagatgatgccaattaggatagtggggaagtatgtgtggagtgtgtggaaactgtggcggggagtgtggaattattccacactccccgccacagttcttttatttaggtaatctatttacttaatttcatccggccagggacaaggtttacctgtcgctttgaaagttggtcgttgtgcatctacttttcttagaaagttgcccagctctttagaaagtttcttcacgatgtccggatgctgtgcactaaggtcgttgctttcttctatatcatcaggtatgttgaataactctttttttcctgttccatagtaataaatcaatttccagtcaccgtttcgaacggcacaattaaagttgattccgggaccgtcatttccccagttgttaggcatattccagaaaagactccgacccttagctgggttgcctgtctgtttcagcagagggatgaaactgataccgtctatcggttgaactgtctggtagttcttgacacctgccatttcaagaatagtagggtagaagtcttctatcaacaagtagttgttgcatttgcttcccggagctactactcccggccaactgacaatcatcggttcgcggataccgccttcataagtagaacctttaccactgttcaatggataattctgtgtatgcagcttgccgtcacgccatccggattcggatgcaagtcctccgttatcactcataaaaatgataatagtgttgttggcttctccattctttttcagccagttcattaaatcacctaaacttttatccattccttcaatcagtgtggcataagcagcttcatggtctgtcattccttttttcttgtacttctcatagaagcgcatatctttgttcaaaggaatgtggatggcatattgcgacatatacaaatagaaaggctgattatactttttcgctttatccagtgctttaatggcttccaacgtcaatgcttcagttacaaaggtttccgttccccaatatttctctaatccgggaacagacatcagtgataccgctttcccatctttggtatgtccgtagttctcttctcccaggtaactggcaagtccaccggccgcatgtccggcaatatttacctcgaatccccaatgatgcggatcttcccctggagtatctatcgctccgaaatgggcttttccacaatgtatagtatgataaccgctgttctttagcagttgcacgaaggaggttcctacgaaagtatgattagtgccggacacttgacttactccattgtaattccagtcagggactgccagaatgctatctttacggtctgtcattgtattcttttgcagcgtccagttagttactcggtgacgtgcggcgttggttccggtgatgaggctgcaccgggtaggagaactgatactgttggcatacgcttgagtaaacatcattccctgttttgctaaccgctccatattgggagtctcgtacaattcgttatagtgtgtcttctgtgtccagaatgggagtgaagtatcctgccatcccatatcgtctaccataaagagaatgatattcggacgtttgtccgcgcgttctatttgcatattgctttgtgcttgcagattggttactgcgagtggcacaaatgcaaggggtaataatgtttttttattcatgggggtcattttattctatggaatatgcattaaaattaataatatctggtaatgcgatagattcggttaaagataagttcgagcactacaaaaaggaatcatttctcaccgtgatgagaataaatactcatagtaatgagaactttttctcatcgcattgagaaaattttctcataggcatgagaatacttgagaaaatgcaagaacgtaacttgttacaaatcaatattgtataatttcaatttattatataaagtctttcgatcaatattcagtaattgcgctgctttactcttattgtttcctgtttggcgtagcgcctccaaaatatgctctttttcagtctcttcattgcgtaatgcaatactcgtattgctggatgcaggagtttctaaaagctcggtccccaattccaataaagtaatgaaactgctttgtgccaataaagttgctcttttgacgatgttcttcatttggcgcaagtttcccggccaatgataattcattaaagcttgcgatgcttttgcatcgaaaccaatcaggtgtttatccagttccttgtttgcctgatcgaggaagaaattggcaaagagcagaatatcttctttccgttctttcagatcgggcatacggagggtaaattcattgatacgatgataaaggtcttcacggaaagtacctttttcaatggcttgttccagattctcattggtggcagataccagacgaatatctaccgatatctcctgtgtagaacctaccggacgtatttttctctcttgcaaggcacgaagcagttgtatctgcacttcataactaaggtttccgatctcatccagaaagatagtaccaccgttggctgcaacgaaagcccccgttttatctgtcagagcacctgtaaacgaacctttcacatgaccgaaaaattcggaagcagccagttctttggggatagaaccacaatctacggcaataaacggtttatcgtttcgtttgctaagttgatgaatacggtgcgccacatactcttttcctgttccgctggaaccgttgataagtacggacatattggtcggagctaccagacctacataattgtagagttgtttggctgcatcactttctccttccagataagcacgatgattttctgttgaatctttagatgaagtagaagcaccttttttagaagaagatttagcaacgttatgagtagcaggactcttttcagactgcagacattcagaaattttcttcagtaattcttccggatttaccggtttggctatataatcacgtgctcccagtttcattgcctgtacggcggattgtatatccgcatagccagtcatgatgattaaaggaatgtccatgccttgttcattcatccatttcagcagatcgataccttcgtggtcgggtagtcgcaggtctgataaaatcagatcgacgttttggctttcgatatgttttcgggcgcgggcaatattactcactgatgatacttcaaagccctttttgcctagccaggtttttagcatcattccaaaagtgatatcatcttcaacgatcaatatggagctcatcatgtcaggttttgattcttttaagtcacaaaggtaagaggatttaggcgaaagtggtatatttgcaaacttaaattaaataaaagtgttatgaaaaagattctattgatagtattaaccatatcgttttgcggacttactgcctgcaaaaccggaacaaaaaaaggaggagacatggataaagaaacgttggtaaagattgagacaactgtaggagatatcgaggtgaaactatataatgagacaccgaaacatcgtgataattttatcaaactggtgaaggacggtgtttatgaaggcacactgtttcatcgtgttatcaaagattttatgattcaggctggtgacccggactcaaagaatgcaccgaaaggaaaaatgctgggtacgggagatgtaggttatactgttcccgctgaatttgtatatcctaaatatttccataagaaaggtgccctgtccgctgcccgtcagggagataatgtgaacccgaagaaagaatcttccggttgtcagttctatatcgtgacaggtaaggtgttcaatgactctaccttgctgggtatggaaagccagatgaatgagaataagattaatgttattttcaatacgctggcacagaaacacatgaaggaaatttataagatgcgaaaagcaaatgacgaaaatggtctttatgatttgcaggaaaagttgtttgcagaggcacaggaaatggcagctaaacaaccggaatttcatttcactccggaacagattgaagcctatacaacggtgggaggaactccgcatctggatggcgaatatactgtgttcggcgaagtagtgaaaggtttggatattgtggataaaatccagcaggtgaaaaccgaccgtagcgatcgtcccgaagaagatgtaaaaataacaaaggtgacaatacttgactgaaatatatgaaaatcaacaggcatattcttgataatgggttacgtctggtacattcgcaggacgaaagtacgcagatggttgcccttaatatattatataatgtgggagctcgcgacgaagatcccgaacataccggttttgcccatttgttcgaacacctgatgttcggagggtcggtgaatattcccgattatgatatgccgcttcaattggcgggtggagagaataatgcctggacgaataatgatataaccaattactacctcactgtacctcgtcagaatgtagaaaccggcttttggttggaatccgaccggatgttgagtcttgattttagcgaacggagtctggaggtacagcggggagtagtaatggaagaattcaaacagcgatgtttgaatcagccttatggggatatcggacatcttttgcgtcctctggcttatcagacgcatccttatcaatggcctactatcggaaaagagttgtcgcatattgccaatgctacgctggaagaagtgaaggcattctttttccgtttttatgctcctaataatgccatattagctgtgaccggtaatatctctttcgaagaggcggttgctttgacggaaaaatggttcggctctattcctcgtcgggaagttcctcaacggaacctgccacaagaacaggaacagacggaagaacggcggctgacggtagagagaaatgttcctctcgattctttatttatggcataccacatgcctgcccattgccatccggattattatgcatttgatattttgtcggatgtgttgagcaacggacgttccagccggttaaaccagcgtttggtacaacagaaacaattattttcgagtatagatgcttatatttccggcagtgtagatgcggggttattccatattagtggtaaaccttcggcaggtgtcaccctggaacaggcggaagcggcagtgcgggaagaactggaactgttgcagcaagaattggttgacgaacaggaactggaaaaagtgaagaacaaatttgagtccacccagatattcggcaacatcaattatttgaatgtggcaaccaacctggcttggtacgaattgcttggccgggcggaggacatggaaaaagaggtcgatcgttatcggtctgtcacggctgaacaattgcgggcggtagctcaatctgctttccgtaaggagaacggagtaatactatattataagaaacaacaaaattaaattctcccttttttaatctatcagtgaaagggaaaagtccctttgcctgaaaatggagatacgtttaggtaacggaaaagtaaatgagacatatttatagtacatataaagagcattataaagcactaatttttctcggactgccgattgtgatcggtcaaataggagtaatcgttcttggatttgcggatacgttaatgatcgggcatcatagtacgattgagctgggagcagcttccttcgtcaataatgtgttcaatctggcgattattttcagtacgggtttttcgtatgggctgactcccattgtgggaggtttgtatggaacccgccagtatgcccctgcgggacaggctttacgcaacagtttgctggcaaacctgatggttgcattgctgctgactgtctgtatgactgttctttatctaaatatagaacgtctcggacagccggaagaattgattcccctgattaaaccgtattaccttgttttgctcgcttcactagtgtttgtcatgcttttcaatggattcaagcagtttacagacggaattacggatacaaaaaccgctatgtggatattgcttggtggaaatgtcttgaatatcataggaaactatatcctgatttatggaaagctcggattgcccgagttaggtctgttgggagcaggtgtcagcacgctgttctcgcgtatcgtgatggtgattatatttatcatcatctttatgcgtagtccgcgttttgtccgctataagattggctttttccgtttgggatggtcacgagctgtatttgggcatttgaatggtctcggatggccggttgcttttcaaatgggaatggagacagcctcctttagtctaagtgcgatcatgatcggttggctgggtactatcgctctggcttctcatcaggttatgctggctatttcgcagtttacatttatgatgtattacggtatgggtgctgctgtggctgttcgtgtcagtaacttcaaaggtcagaatgatatcattaatgtacgtcgttctgcctatgcaggttttcatctgatgatgacattgggcgttgtgctttctttgattgtcttcctttgccggaattacttgggaggctggtttaccgacagtcaggaagtggctgctatggtgacctctctaatcttccctttcctcgtttaccagtttggcgacggactgcagattactttcgccaatgctttgcgtggaatttcagatgtaaaactaatgatgattatcgcctttgtcgcctatttcattatttctcttcctgtaggttatttctgcggctttgtcatgggatggggagtagtaggtgtctggatggcatttccttttggtttgacgagcgcaggattgatgctttggtggcgttttcatcacatgacgaaactccccgaacctcaccccaaaacctgatgctaaatacttgataattaaaacttaatacttaaccccaatggcttccttccgttttacaaagttgaaaataaccgccggttacactttgttgctggcgatcctccttttctcgctggtgtttgtacatcgtgagatggaagcattgtcggccgccgacgatcaacagaatttaagaacagacagtttattgacccttctccatgagaaagatcaaaacacgattcagatgttgcgggtgctaagtgaggcaaacgacagccttctctctgcttcggaaatagaagaaatcatatccgaacaggattctgtgattacccagcaacgggtacaacatcgggtcatcaccaaacgtgactcgttaatcactactcctaaaaagaagggattcttcaaacgactcgccgaagtgttttccccttctaaacaagacagtgccgtattagtaaatacatcgttggaagtagccactgataccattctccaaccgaccacttctaaagattctcttcagcagaaaatccgcatggctaccgaagaaaaacggttgcaacggaggaaaacaatccgacgtaccagtacaaagtaccagcggatgaatacgcagttgacggcacggatggatagcttgattaaacagtatgaggaagaaatgaccttgcgtgcccgtcaggatgccgaacttcagcaggaagtgaggatgcggtcggcacgtatcatcggcggtatcgcggttggtgccgtactattatcggcttttttcctgatattgattatgcgggatatttcccgtagcaaccgttaccgccagcaattggaggtggcgaataaacgggcggaagatttgctgatcgcccgtgaaaaattaatgcttgccattacccatgattttaaagctccgttaggctcaattatgggatataccgaactcctgtcccgattgacagaagatgaacggcaacgattctacctcgacaatatgaaaagttcttcagaacatttattgaagttagtcagtgacttgcttgatttccaccggcttgatctcaataaagcggaagtgaatcgcgtaacctttaacccttcccagctattcgacgaaatttatgtcagtttcgaacctttgaccgctgccaaaggtttagccttgcaatgtcacgtcgtcccggaactgaatggaagatatatcagtgatcctttgcgactccggcaaattgtgaacaaccttttgtccaatgccgtaaagtttactcaaaaaggagaaattagcctgacagccagttatgattcttctaagttaaccatcgccattgccgatacaggaaaaggaatggcatcagaagatcgtgaacgtatcttccaagaatttacacgtctttccggtgcgcagggggaagaaggtttcggactcggactctctattgtgaagaaattggtaaccttgcttgaaggaaccattgacgtgcaaagcacattaggaaaagggagctgttttactgtaactttacctctttatccggtaggtaaatccattgcggaaagcgaatctccggaaaatgaatcttcggaggacgaaagtccatacgctcccaaacagtcggttgccattcctcccatgaaagtcattcgtgtgcttttgattgatgacgataagattcagctgaatctgactgctgccatgttgaaacagcatggtattgatgccgtatgttgtgaacagctggaacagctgattgaacaacttcgctcttccgtcttcgatgtattgctgacagatatacaaatgcctgccattaacgggtttgatctggtaaaactattacgggcttctaatataccacaagcaaaaacaatccctgttattgctgtgactgcccgtagtgaaatggataaagccgctttacatgaacatggttttgccggttgtttgcataaaccgtttacagtaaaggaattgttgctaacagtaaatgaaggtcaactttcggccgatgaagcgcatataacagaagatatgcaactaaatgtaaatgccctcacttctttttcggaggatgatcctgaagctacacattccattatccaaacatttatagaggaaacacaaaagagtgctgaccggatggtgcaggcattaaatgctaaggaggtggatgaaatagctgcaatagctcacaaacttcttcctctttttacattgattggagctgggaatgctgtaattctactgagttggttggaggcaaggcgtggggaggacttttctacggaaataaatgaaaaggttgagagcattcttcaagaaattcagaaaatcctgaaagaggtaaacggtgtagagtgttcgaatattcttaattctgaaatatgatttaatgtttatttattgtttttttctatcgtttatttctatatttgctgtctaaaacttgctaaatgatacgtgagcctggtttttctattaatcggaaagatatatttgaaagattgttcagtgattattacgggatattagtatgttatgctcaaaaatatacgaaacgtgaagatatagctgaagatatcgtacaagatgtatttgcatctttgtgggaagaaaatcgtatatttccttcgcaagcgaattttcgttcatttctttatatttcgataagaaatgcggcttttgattatttgcgacatcaaaatgtagaaagtcgttatattgaagaagctttgactgcaaatcgtttcttgtcggatgattcttttcagaaagaagaagtttttcgcttactatttaaacagattgatttacttccggaacgttgtcgggaaatattcttgttacatctggaaggttatgataatgatgctattgctaaaaaattatcgttgtcaatagaaactgttaaaactcaaaagaaacgtgcaatgaaaactcttcggaacaatctgaaagagaaattgcaaaaaaaatatccagatacctcattttttattcttttcttgtacctcgatttatatctataatcgtttgtgtaatacaaatgataattagatagtatggagattgaaaaactaattgttaaatacttggtcgggtgtttatctaaagaagaagaccaaattctaaaaaaatggttgcaagaggatgaatctcatctgcgtttttttcagaaaatcaacttggataagactgctgttgaggattatcgtcaatatcatcgttttgatgctaaatcggatgaggctttccgtaaagtatggacctctttacataagggaactagaaggatatcaacgcaaagaaaaataggctttttttctcgtcgttggttgaagattgcttgtgctctactgatattgctattttctgtagggggaggactctatttttactatgaggcatcacgaataactcctggagagtcaaaagcaatattgactttagaagatggtagtgctaaacaattgaaaaaatcagggcaagaacattggatttatataggtgatacacctattgcaagagagtatgatggggtgattgtttatcatatcccagaaacatcaaaagtggaaataagtcaacagaatactttgtctgttcctcgtggaggagaatttcgattaactttatcagatggaacaagggtacatttgaattctttatcagagttgaaatatccggttagttttaaaggtatgaatgaacgaactgtagaattgaaaggggaggccttttttgaaatagcgaaagattcattacatccatttaaagtagaaactcaaggaattttgatacagcagtttgggacggcgtttaatgtgaagtctcgtgtgaaaggaaaagttgaagttgctttagtgcagggtagcattggaatttatactcaatctcaaaagttgcataaactatcaccaggacagctagccatatgggatgcttctacggatcttttatcagttgaaaataaagatttgttattaaataccgcttggcattctaatcgttttattttttatgatgagagtctgggaagtctgatggaagaacttgcattgtggtataatgtagatgttgatttcttagataaatcattgaaagaacttcatttcacaggcagtttatatcgatatgacgatatagctgtcattttgaatgctatcgaagagacagtaactgttgactttaagatttccggacttcgtattaaaattgatcggaagaataaataataatatataagtgattatgagaattctaattattataatgttgctatgtacaacattagtccctaattacctgtatgccatttctcatgaaaattatagtgaggaatcgttcttgttcgttggtgaagattatatgcaagagaattataaggtaacgttacatttgagtggtgtttctgttagtacattgtttaatgagatccaaaaacagaccaaactggattttgtttataatacagaattattggagactataacaccgatttccgttacggcagaaaaggaatcagtttttgatgttttgaatcgtttgtttaatggaacaggttttatttttaaaaagtctggcaatattatcactgttaataaaaaagaagaactacagcaggatgataaattcttagtaacaggagaagtaaaggatgataccggtgaaccattagtcggtgtaactatacaacaaaaggatactcgtaatattacgataacggatatggatggacgctattcaattcaagtgtctagtaaggcagaggcttttttaactttttcatttgtggggatgaaaacgaaaacagtacccgttaagggaagagtacttaatgtaaaacttgttcaggatgcgatttctattgatgatgtcgtggttgtaggagcgtatggtacagcacaaaagaggctagaccaagtcggtagtgcttttcaagtgaatgctgaccagttaaaagcattaccagctttacgagtggataaaatgttggatggcttgattccgggagtgaaaattgatccgaatacagattcaccggataatacacgtgcacgttacaatgtaagggttcgtggagatgcttctctatctgcttcgaacgagccattgtgggttgtggatgggactcctatttatacaggtgaacatactaatttgattcctggaatgagtacgactatcagtccgttatcttttatcaatcctgatgatattgagtcaataacagtattgaaggatgctacggcaacttccatttacggagcgaatggtgcaaacggagtcatattgataacaactaaaaaaggaaaagaaggtgacttgcgtattcatttaacggctcaatatggagttgcaaagattgataagagtactagtccgaaagttctgaatgccaatcaatatctaatgttagctaaggaagcttatcaaaatgcagggaacgatttaaaatactttccctatactgataatgaaatgaacaaatacagccttacaaatacagattggacagatgtgttttatgataccgctaatacttttcaaacaaatttatctttaatgggaggggctcggaatacagcgtattatttatcagcttcttatttagagaatacagcaacggtgaaagggaataaacaacagcgtttttctattcgttctaatttggattttacttttcttcgaaagtttaaggtctcggttgatcttgctacttcttataatgtgaatgatttgtttaatccaggaagggattattatgagtacttaccgatattcgaaccatataatgaagatggaacttttcgtctttacaataaggttatatccggaaaagaaacggatggaagccctaaatggtcggagaaccgtttcttgaacagtgtagcggaaagggaagagaatatttataatcaaaagactttatatacgaatgccaatttaatgttgagatatgatattctttcagggttatcttacacaggacaatttggtgttgattatcagtcaggtaaggaagaaatttattatgctcgtactaattggtccggaatgacgagcgctgatggtccgataggttattccactagaaactcattaaatatgatgaactggactactgtacatcgcattaattataagcagtcttttgataaacatgatataagtggattattggggattgaggctggttcacaggactatgtgacacttggagttacagggtcaggcttcattaatgatcatattcaagatgtgtcttatgcaaaagagcgtaaagggactaatactagtaagacgaaacgcaaagcttctatgttagggcagcttagttattcttacgatcatcgatattatgtgacattaaatggacgtagagacggaaattcacaatttgggtcagatgtacgctgggctaattttggttctataggagtttcttggaatgttcagaatgagagtttttacaatattccatggatgaatattttgaaaataaaagctagttatggggcaaatggaaattcccgcttaggttctcaggaagctcttggcttatattcttatggggaaagttattcttatgcaggagaaataggtggtgttatgtcggggtgtccaaacagccgtttgagttgggaaactacttatatgacaaatataggtgttcgtgtacgcttgttcgatcgtttggatatagaagttgaagggtatcataataagacaactaatttgttgagtaatttagatgtttctcgaacgacaggtgatactcgtgtgtatagaaatgtaggaacaatattaaataaagggattgaagtgactataactagtcacaatttccggtcgaagaaagatggtgatttcagttggttaactgatctgaatctagcacataatagtaataaactcttagagctatataatggcattcagaaaaatatgggtgagatggtttggagggaaggatatgacatacatacatataacttagtgcgctgggctggagttgatcctcgtgacggagcacctttgtggtatgatgcaaaagggaatataacacggatttacagtacggataaccgtgtcccgtataagagttcaactcctgtcctagctggtggcttgacaaatactttaacgtacaaagattttagtttgcgctttatgttcaattattcaataggaggctacggatttacatctttcggtagggcaagtaattcggatgggttgaatataatgacggaaaatcagtctattgaccagttgaatcgttggcaaaaatccggcgatttagtgctgaaccctaaaccaatatggggtgtctctactcagtcggtgatgaactctacccgttatttgtataacaaaactcaggttcgtttgcagaatctagtattttcctatcgaattccccggacaattctacattcgactggcttaaaagattgttctatttctttaattggagataatttatgggtctggaccccttattcgggaaaggatcataattcttataaaacatgtatgagtggttatccgatggaaagatatttctcgatagcactaaatgtaggattataattaaataggtttaagataacatgaaaaaaagaatatatctactagccggtgctttatgcatcattatgcaattggttagcagttgtaccaattttttagaagttgaagaaaaaggaaaaacaacaatcccttcattcctttcagatcctgacggacttaatgcagggctggttggcgcatataataagatgtatgcttattatgacaatgagtttacaaaatatccggatgttgccggaaatatgttgtcaatgaagtatgtctctgcaggagcagatatgcttgatcagtataattttacttctgatgctttacaagagacaggagctgtagggtatatttggcgtaaaatatatgaagccttggcaaatgtgaataatgtaattcaatatcagcctcaggtgatttcagcttatccgaatgcaaaggatatgtgtcaacgtattctcggagaagctttattcttgagggcattgtgccatttcgatttatgtagggtatatgcacaaccttataattacacgtcagatgcttcacatttaggagttcctattctattaaaaactccaggtcccgatgataatgtttccagggagagtgttaagaaagtatatttacaaattttagcagatttggaacgagctgccgattgtttcaggggcattgaatcaagtggaatatattatgcttctttacaagcggtcaacgcattatattcgagagtctatttgtatatggaagattggaataacgccctgaagtatgcaaaactggcaattgggacagggaaactgtctcaaggagatacctatttaaatatgtaccaggatctttctactacgggagaagctatctttcgattgaatggaatagatcaatcaggaaaattaaaggctttttatgatgcttcctgtgttcctgcagatacattatttacgttgttcgatgaaggggatatccgtcttggcttacttagaaataaagatggaatagcttattgttccaaatattattctctaaaacagccagataatcaagtgaatagggatgatccatttgttttccgtctttccgaaatgtatatgaatgctgctgaagcagcttggcatctgaaagattatacagctgcttccggatatcttaaatctattttggagcgtgctgtagatacagactatgcagtcaatacacttagtcaatattcagacgcaaaactgatacaactgatagagaaggaacgtgtaaaggaactctgttttgagggacataacttctttgacattatacgctggaagcaggatcttaaacgtgaggaaaatacgaattcttcagtggaaaagatcgtttatcctagtgattattttgtattgcctattccgcaagtagaattgaatgcgaatacaaatatgcaacccaatccgacagtaaacaattaaaaataaatcatttatgagatcactatactttatattactaataagctgcctttgggcatgtactactgatgagaaagagccttatgatacgccttttattcatattatgacagataaaggtgtatctaaagttattgtcaagtcggatgtgaataacattaatacttatagtgtgtatctgagttcgaaacctctgactgagaatctggaagtgaactatcaagtcatagtaggagatggtctgaaatccggtgttgattttgaactggtaacaaagggtagtacattaacttttctaccgggtatttatgatatgcccatacgcatccgatggatgccaaatcatttagatgagaacaaagacaatacaataaccattcgtttgactggcaataatcaaggactgactatggggcttccaggtcccgacggtttacagcgcgaactggtgatagagaaacagaattaatgaaggagtagaatgaaaaagtttttatggctgatttttataggcttattgctaagccctgttgtatacgggcaatcatcggagttcttacagtatgataagaatctgattgtaagaaaactggataatggattaacctattatatttacccgaatacgaatcccaaaggggaagccgtttatcgtttgtttgtgaaggctggttccgtcatggagaaggagaatcaacgaggattggctcatttcctagaacacatggcatttaatggtagttatcatttcccctctgatggtatggttcgtttcttagagtcgaaaggagccaaattcgggaaagatttaaacgcgcacacctcgtttaatgagactgtgtataaattgcagttgccttcatccaatcctcaaatggtagattcaacattaactatcttagctgattgggcaggcgggctttctatcaattcaatgcaggtagaaaaagaacgtggagttatactttcggaatggttgtcgaagagagatgccaaacgcgatagtgatacagcttttctattggagcttctgaatagttcgcactattccgaacgaatgactattggtgatacggctgtcattagaaactgtaaacgagaggatattctggattattatcaaacatggtatcatccttcactaatggctgtggccgttgtaggtgatataaatcctgaacaggttgagacgcttataaaggagaaattcgggaaactatcgtctcttgcctctcctatttggaagcaatgccacattcctgtttataaaaaggaagcggtaaagatacttaccaatgaatcgctgaaaacaatagaattggatatgattcagttgctgccactttcaaaaccggttcagacagcaaaggattataaggcttatttgacccgaacattattgaatcgcctttttaagatgcgaatgaatgcttgggcttttgaaaatccttcttataggaaagccagtattcagtactcaagttttctgaatgcaactggagtattgctatgttcggtagaactactacctgggaaaatggaaaaaggtatttcggagtttattgcacagcaacagcaaatctttcgttatgggtttactgagacggaaatagaacgtgccaaaaaggttatttataataacttggagaataaacttcaaaatcagcaaaatcctgcttccgttgaattaatgaacgatatttatgccgatttttatgtaggaaacagatttacctcattacaagaagagtatcgattagttcaacgatattttccagaactagactctgttgctttggttaggaatttggcaaaagtatattcaccccaaaagatgcattatctattgcgagcaaatgaaaaagctaataaggaagtgaatggagatgcgactttgatgtcaattataaaagaagccagaaaacaatcttcgaaacggtataataaatatttttctgtaccggatgaattatgccaattaccgtcggggggacatattgtcagagaagaaaatataccagagataggagctgtgtctctttggctaaataatggcacgcgcattatatttaagtcttcagaactcgataaggggaaggcgttgttgactggttttcggaaaggagggctttattctttagattctttacattattatacaggtctattcgctcccagtattatttcactttctggagccggaaatttttcaagggatgcattgaactattttctggcaggaaactctgcttctatgcgtctacttgttgataagacacgtactgggctagctggagtatcgcaggtaaaggatatggaaacaatgtttcaactactctataccaaatggatgtaccctcagttggatacagcaatttgtaaacaaacaatagagaagacaaaagaaaattatcgtgtcaagcaaaaaagtccgacggagttttttcaggaagaactaatgtggcttttgaacggacgaaattacacaaatacaatactttctgattctttaataacacgatatgtaaagcaagaggatatgcttcctctattcaatcgtttttatggtgcagcgaaagattacacatttgttattttgggagactgtactatacaggatataaagccgttaatcactacatatattggtggattacctaaaggatcgaatgatacggattggtgttatacagaacgtaatataccttataaatcctgttcattgatacgtcacacgggggattctcctaaagcatcagtttcattgattttccagcaagacagtttgttagaggagtttagctcattcacattgaaatcgaatgtaatgaaagcgatgttgcgcacttgtttacttaaccgtttgcgtgaggaaatgggaaaagtctatagtgtaagcgtagcttcgagtgcgggtttatatccttctttcttatcacgaacgatgattggatttgtctgcttgccagaggatgttgatagtttggttaatgctacacaagaagaattacaaagactttatgaatatccggaatcatttgacggtatgttaacggatgttaaacgtaatcttttgaaagattttgaattggataaacaaaaaaactctttttggacttcttggattcgcaattccatattcaatcaacaggaggattggaaatatctgaataattatgcacaaacagtaaatagtataacagcaaaagatatttcttcttttgcaaaatctttattgagcactactcccatgataaaagctgtgctttaccctaaaaattagtaataatatgattgtataacaggactccggtccacaaatatttatggtatgaatagaatgaaagatttattttggatggcagtaattgttttgtttgctgcgttttcatcttgttcggatgacaagaatgatgggacagatgaaggagttgaagctaagctgttaacctttgggttttatgctgaagataattcaagtatattatcagatgattatatagctaccctatcttccacaacagctaaggttactatgcctgcatttatagataaaagtgcacttgtcgctcgctttacgacgaacgatggtaatatcgtcttggtagatggagttacacaagttagtggtgctactgccaatgattttacagctcctgtagattacattgttagtaatggaaaacagaatgtaaagtatacgataacagttgctaagtcttctaatatggcttgggtaagaatgccggactttacagcgacatcagttttcagtggatctgttttaaaaataaacccggtggatcaagttccatatcttggttttaaactaaaagaagaagagaaaatggctgtcataaaacttgttgatggtacaacttggacagcagttggttctttagaaggctttggaggagaagttagtttgtcaaattatgattttgatattgacaaggatggaattccttatgtcgtttattctgataacagtgctaccacagttgcaggtgctgcgtctttaatgaaatggaatgggactacctggaattatgtaggtaatcaaggatttgtaaatgctcaatctcagcaattacatttaagagtattagataatggagagactattgtttcacaagtgaacaatagcaacaaagtttcttttccaaggcgagtgttagttatgtctatttatcagaacagttgggcgagtagtgaattaccacttttggcttccgggactccaatctataattgtaatcttgctaagacagagcatgctgcctatctgttggtggttaaccgtggggcagtagcaggcgtaaattatggtcattcagtatatgaatataaaaatggaacatggagtattctattaaataactatgtagaaccaaatgctactcagactggtattgttggattggatattgaagcagaagaaaatggtacactttatatcttaacaagtgatgatgcagtgacatcaggtgtgtataacttgagactaaagaaatatgatccggtaacaaaacaatggtccacagtaggaggaaatccattgcctttggattttaaaacctcaacttcaacttcagtggccatatcaatagctcctgatggtactccttttgttgcctacagagatgaacaagatcaagattatccaaaggttatttatttggataatgaaactaagcaatggtcagatcctcataaattagcagatattgcttctagtaatttgaatatagctttctcctccacaggagttggatatatttcatttacagatgacaataaccatgctatagtttttaaatatacagataagtaaacgttatgcttttaataaaataatgtaaatgcgaggaagggtatagatggtttttatcttaatccttaattccgcaacactattataaattaaactttttaagtacctgagcaacaaaaagttgctcaggattttgccatgtcagaattttcacttatcttagtgttgcaaaaaaaacaagagaatccgacgatagacatggcgaagatacaaattaaatctgagagactcactccttttgggggattattttcaatcatggagcaatttgactccacattatcatctgtaatcgactcaaccctcggtctaaggtgtagatcgttcggttatcagtacagcgaaatcatccgttctctcatgagtatctacttctgtagcggttcatgtattgaggatgtcactactcatttgatgaaccacctctcgcttcatccgacacttcgcacttgtagctctgatactatcctcagggcgataaaggagttgacgcaagaaaacatttcatacacatcagatatgggcaagacctacgatttcaatacggctgacactctcaatactttattgctcaattgtatatttgcatctggccaactgaaagagggtgagatgtatgatgttgatttcgaccatcagttcatagagacagagaagtatgatgcaaagcctacatacaagaagttccttggttatcgccctggcgtggcggttattggcgatttgatagtcggtatagagaatagcgatggtaacacaaatgttcgtttccatcagaaggacacgctgaagaggttctttgcgagatttgaacagaatgggctcactatcaatcgcttcagagctgattgtggatcatgttccgaggaaatcgtggaggaaatagaaaaacactgcaagtccttctatatccgtgctaaccgctgcagttcgatctacaatgacacctttgctctcaaaggctggaaaactgaggaaatcaatggcattgagtttgaattgaactctatccttgttgagaagtggaaaggtaaggcatatcgacttgtgattcaaagacagaaacggatggatggtgtgcaggatttttgggaaggagaatacacataccgttgtatcctgactaacgactatgattcttccgtaagagaaattgtcgagttctataaccttcgtggaggaaaggaacgtatcttcgatgatatgaacaatggtttcgggtgggacagattgcccaaatccttcatggcagagaacacagtgttccttcttcttacagcacttatccgtaacttttacaaggccattattcaaagacttgacgtaaagaagttcgggctcaatgcaacaagtcgcataaaagcgtttgtcttcaggtttatctctgtaccagccaagtggatcaggacatcaaggcggtatgtgctgaacatctatacctgtaataatgcttacgcagatgttttccagactgattttggataatgcctacaacttatgggaatgatattgtgtattgcctcaagtcacattgtggggtaaggggatattgtaggcagaagtgggtgcttcaagttcaaattatctgcaaattcagtaatgagaggacgtgtaaacgcaataaggacgttcaagggcttagttgcggatttgaggttaatatatccttccttgtttttatcttaataagatgaaaaaatgaaaaagttcatgattatatatatattcttcttattaggcagttttgtttccacaaaatgtttggctcaagatgttgcttggatagaaggttgtgtctatgaagatggtaatcaaaatgggattcaggacaaaggagaaaaaggtatttcgggaatagccatatctaatggagatactgttctacttgcagataaacagggacatttcagaatcagactttctaagggaaacagtatcttcccgattcttccgaataattggacactattgtctaatcaaatagtaaattcaggattttattattggaatagtcatggggataccgagacgcaacaaatcaattttggattgaataagaaaaaggtaaataagcatttctcaataaacgcaataggagatgtacaagtcggtaattctcaggagttggattatgcttcccgttctttatggccagaacttttgcaagcagattcgtcttcgttcaatatatttttaggtgatttagtgaataacaatttaaatttatttcccgctatcaaacagatgatggaactattgcctatacaatcatggacagttataggtaatcacgatcgggatgctgattctataaggattaatcaaaccttttcatataatacagcttttggatcagcgacttatgcttttaacgaaggaaacgtacattttattgttctaaataatgtctatggtaaaggaacacgttcttatgtagggaagatttctgatagtcaattgcgctttgtctcaaatgatctgaaacttgtacctaaaaatgctcagatcgtactttgtatgcatattccattagtacatactactaattcatccgcattgattgaaatattagaaggacgagggaatgttttagctttgactgggcacatgcatcaggtggagaggaattttttacatggtcaggatgtttgtgtacatgaattagtaacaggggcttcttgtggtttctggtgggtgggagaaaaggattgggaaggtattccgtctgctttgatgcaatgtggtactcctcgtaattattttgtttttgattttacagagaaagactattctttccggtataagggcatagggatggatgcttcccgacagatgaatatttggattgcaggtattgactcgacagatgtttatatcgatgaattgagaaagaaacaccagggagaaatgcttgtaactgtttatggagcttcagatagtacaatagtacgttgtcgtttggataatggtgaatggttattatgtgagaagaaagaagaacttgatgtgaatgtagcaagggtgagaagttggaatcagctaaaaatatatccaactcgtttcaatcgtagaaatccgttcagaaggcaattttctcctcaaatctggggactacaattacctaaagagtgctgcgaaggtgttcatttgatcgctgttgaagcttctgatcaatggggatttaaagctagtggcgaacgctgcttttattatcaaagatagtattttttaaggaattctgtatatctgtaaatagagccaatatctgtcttattagacaatcggatacattgggtaatatgactaacaagtaacttcatcttttttattatgatataaatgaagcaatataagtcgctgcttctggtgaagtcagaaaaaacagaatacttatatttcttttgttgcagaacattttgctcctgtcgtcaaccttttttcggaataatttgtttactttgtgtcaccttatttacactgacacattttacatgaaacgaaaatggatacgttgggtaagctggatactgcttactcctataatactctttgtaatactaatggtattgctttatgttcctcccgttcagaatcttttgcgtcgggaggttactgcatacgcctctaaagtaaccggcatgcagattcaggtggagcggatagaccttcgtttcccacttaatctgttggtacgtggcgtggaggtcattcaacagccggacacccttttgtctttagaaagcctcaatgtccgtgtacaggcatggccgttgataaaaggaaaagttgaagtggatgaagtgactttgagccgggtagccgttaattcagccgatttgatggagggaatgaagattaaaggcgttttgggacgtttcttcctgcaaagtcatggcgtcgatctgtctaatgaactagcggtaatcaatcaggtcgaactatccgacactcacatgcagctactgatgaatgataccacaactacgcccaaagataccacagcttctgctccgatcaactggaaagtagctcttcatcagttgaaattgaaaaatgtatcgttcggcatgcaacttcctgctgattccatgcgtatgacggcccatattggagaagcggccatcaataatgctcaagcagatttgaagaatcaatactacgacttgaagaagttcttattatcgggaacctccgccagctatgataccggaactgctcaaccgacagagggcttcgacgcttctcatattgccgttcgggatattcgcatcgctctggattccttgctgtataaagggagggatatgaacgcagtcattcgtgaatttaccatgaacgaacgctccggattgagcgtcactgccctgacgggtagagcctactccaatgattctgttatctgtgttcccagtttgaaactgaacactccacattctgaaatcgatttatctgcacatacctattgggaactggtcaacatcccgactacgggccgcttatctgcccgtctcaatgcctatattggcaaagaagacgtcatgttatttgccggtgctctacctgaaagcttcaaagaagcctatccattccgcccgctcgtcatccgtgccggtacggatggcaatctgaaagaaatgcagatttcccgctttacagtagacctgccaggggcttttgcattggagggcggtggtcttttggaaaacctcgccgacagcctcacacgcaccggaaccatcggtctgaaaatgaccactcaaaacctaaacttcctgaccgctctgtcgggagaagcccctaatggcacgcttgttattcctgacagtatgaatctggtggcgaaagtggatatcaaaggtcctgaatataaagcaaatctccgtttgaaagaaggacaaggagctatggatgtgaatgcggccttaaataccgctaccgaagtctataaggctgatctgaaaatagacaatctgcaacttcatagtttcctcccgaaagactctatctatgaactttctctctcggctgcagctaatggtcgtggattagatgtcatgtcctaccattcatttgccaaattgaatcttgcattagatcaacttcattatgctaaataccatctttccgatcttgatctgacgggagaacttaaaggcgcattggtcactgcacatctgacaagcgataatgctttattgaaaatgataacagatgctgaatataatctggcacacagttaccccgacggtaaaataacgattgatgttactcaactggatttgcatgaactgggaattataccgcagtcaatgaagcgtccgttgacttttaacttagttgccgaagcccgtcgggatttagtttcggcacatttaatctccggtgatatgaaactcgacttgagcgcacgctccggtgttaatcctttaattcgccaatctactcattttgtggatgtattgatgaagcagattgatgagaaagcattgaatcacgctgaattgcgtaaggcgttaccgacggcagttttctctttctctgcagggcaagaaaaccccttggcgtattttctggctactaaaaagattgcttaccatgatgcttcagtgaaatttggaacggctcctgattggggaatcaatggaaaagccgctattcacgctttgaaagtagacaccttacaactagacacgattttctttaccgtcaaacaagatactacactcatgaaattgcgtgccggcgttattaacggaccgaagaatccgcaattctctttttctactacactgacgggagagattcgtgaccgggatgcagaactgttggtagactttaagaatggaaaaggagaaacaggcgtactgctcggtgtcaatgctcgtcctctgtttgaaggtcatggaaaaggcgatgggttagctttcacattaattccggaagagccgataatagccttccaaaaattccactttaatgaaaatcacaactggatttatgtgcataagaatatgcgtgtatacgctaatgtagatatgtgggatgatgaaggaatgggattccgtgtacattcggtgcggggagatactgtttctttacagaatattgatgtcgaaatccgaagaatcagtttagccgaattgagcaaggtactaccttatttcccggaaataaccggtttgttctctgcggaagcacactacgtacagactgaaaaagatcttcagctttcggttgaatcatctattgacgagctgacttatgaacatcaacgaattggtgatataacattaggagctacttggttaccgggagaacaggggaaacaatatcttaacgcctatctgaatcatgacaaagtggaagtgatggtggcggatggtaagctggttccaacccagacaggaaaagacagtctggaagtaaacgctactctggagcatttcccgctacgtgtagctaacgtatttattcctgataaaatggctacgctggccggtgatatggatggtaatctgaatattgcgggtagcaccgagcagcctttgataaatggcgaactgatattggatagcgtttctgttctttcccgccaatatggtgctaatttcaggttcgacgaccgtccggtacagataaagaataatcggttggaatttgataaattcgctatctatacaacaggaaaaactccattcacgattgacggttatgttgatttcagggatatgtcccgaccgatggcgaatctgaatctgctggcgcagaactatacgcttctggatgccaaacgcactcgtgagagtctggtctacggaaaagtctttgccgatttccgggcaacagtgaaagggccgttggatggattgaacatgcgtggaaacatgagcctgctgggtaatacagacgtttcctatatcttgaccgactcgccgttgacggtacaggatcgtttgggaagtctggtaacctttacttcgtttagcgacaccactacggttgtccaacaagaagtgccgactgtttctttaggcgggttggacatggtgatgatggtacatatcgatccatccgtccgtttgaaagtcgatttggatgcaagcaatgacaatcgtgtcgaactggaagggggaggtgacctctctatgaaatatactccgcaaggtgatctgacattgaccggacgctatacgttgagcggcggtttgatgaaatatgctttacctgtcattgctgccaaagaatttgctatcgataacggtagctatgtggaatggacaggaaaccccatggatccgatgttgaacttcaaagcaaccgatcgtatccgtgcttctgtttccgagggagagaacggcggaacacgttcggttaatttcgatgtgtccatcgttgtcaagaaccggttggataatctttcttttgcatttgatgtatctgctcccgaagatgcaaccatacaaaacgagttgacagccatgggggcggaagagagaggtaaacaagccctctatattatggttatgaaaacctatcttggcaccggaccgattggtggcggaggtggtggattgggtaaactgaatatgggttccgcactgaactccgtattaagcagccaaatcaactcattgatgggaaatttgaaaaatgccagtgtttctgtcggtatcgaagatcacgatttgtcggatacgggtggtaagcgtacggattacagtttccgttattcacaacgtctctttaacaaccgtttccagattgtaatcggaggtaaggtgtctacaggtgagaatgcgacgaatgatgcggaatcctttatcgataacatctctctggaatatcgtttggatagaaccggaacccgttatgttcgtctgttctacgataaaaactacgagagtgtactcgaaggcgagattacggaaacaggagtcggtctggtacttcgcaagaaactggacaaactcagtgaactgttcatctttaagaaaaagaagtaagcatgaaagggatatataataacatattagcaagttgtctgattggtatcattttgttttcgggctgttcggtgacaaaacacctgcctgaaggggaggtactttatacaggaggaaaaacggtggtagagaataagtcggcaacaccggtaggagagacggctttaacagagattgatgcggctcttgacaaaactcccagtacaaagatgttaggaggccttctgcctattccttttaaaatgtggatgtataacgactttgtgaaatataaaaagggatttggaaagtggatgttcaaccgcctggctgccaatcctccggtgtttatctctactgtcaatccggaggttcgtatcaaggtggctacaaacttactccgtgattatggttacttcaatgggaaagtgacttatgaaacattggtcgataagaaagacagcctgaaagcaagtattctttatacggtagacatgaagaatccttattttatagatacggtttattatcagcgtttcactcctcaaacgttgcgcattatggaacggggacgtcgaatgtcttatataagtcccggcgagcagtttaacgtggtcgatctggatgaagagcgtacccgtatcagtacgctgttgcgtaaccggggatatttttacttccgtcccgattatatgacttatcaggcagatacgacattggttcccggtggacatatcagccttcgtctgattcccgttccgggattacccgctgcggcacaacgtccttactatgtaggagatgcttctgtttacctgtttggcaagaatggtgaggcgcccaatgacagcatgatgtataagaatctgaatatacattattataagaaattgcaggtacgtccgaatatgctttatcgttggttgaactatcaacagtttgtgcggaatgcacagatgcgggcttccaatcgcacccgtctttacagtcagtatcgacaggagcaggtgcaggagaaacttagccagttgggaatcttcagttatctggatttgcaatatgccccgaaagatacgacagccgtttgtgatacgttgaacgtaaccatgcaggccacatttgccaagccactggacgccgaactggaattgaatgtcgtaaccaaaagtaacgaccaaaccggtcccggggcatcattcggtgtcacccggaacaatgtattcggaggtggtgaaagctggaacgtgaagctgaaaggctcttatgaatggcaaaccggcggaggagaaaaaagctctttgatgaacagctgggagatgggagtttccacctctctgactttcccgcgcgtggttttcccgcattgggggaaaagggagtttgacttcccggctaccactacattccgtctatacatcgaccagttgaaccgtgccaggtattataaactgttgtcattcggcggaaatgctacctacgatttccagccgacacgtacaagccggcatagtatcacccctttcaaactgacattcaacgtcctgcaacaccaatcggaagaattcagggaaattgccgatgccaatcctgcattatatatcagtttaaaagaccagtttattcctgctatggaatatacctatacctatgataatgcttccgcacgcggtattaaaaatccgatttggtggcaatcgactgtaacctctgccggtaacctgacctcggtgatttaccgtgctttcggtcagtctttcaacaaagaggacaaacgtttgctgaacgtccctttcgcgcagtttgtgaaactgaatacggaattccgccatttgtggaatatggacaagaataataagattgcttcccgtgtagctttgggcgctctcttcgcctacggtaatgcaacgatagccccttacagcgaacaattctatgtgggtggtgccaacagcatccgcgctttcacagtacgtagcatcggcccgggcggataccatccggcagaaagccgctattcttacctcgaccagacgggtactttccgttttgaggcaaatgtagaataccgtttccgtatctttaaaagtttttggggagccactttcctggatgcgggaaacgtgtggctgatgcgcaaggatgaggcccgtcccaattcacaactcgaactgaaaacgttcccgaaacagatcgctttgggcaccggtgtcggtattcgttatgatatggatattcttgtgttccgtcttgatttcggtattcctttgcatctgccttacgatacagaacgaagcggatattacaatgtcacaggatcctttatgaagaatctgggaatacattttgctatcggttatcccttctaatgaatgatttttgtacgattttggtaaataatgattgatatttgtcctgttggattcaactatttttgtaattttgcaacgaaatctgatgccgttgacatcactaaccttttaatattacacaatttatgaaaccaactttattcttattggcagccggtatgggtagccgttatggaggcttgaagcaattagacggactgggtcctaatggcgaaactattatggattactcaatctatgatgctatcaatgccggatttggcaaacttgtatttgtaatccgcaaagattttgaacaagatttccgtgataaaattatttccaaatacgaaggtcacattccttgcgaactggtatttcaatcaatcgacgatcttccggaaggctttacttgcccggcagaccgtaccaaaccttggggtactaaccatgcagtaatgatgggcgctgatgtgattaaggaaccgtttgcagtgatcaactgtgatgacttctatggtcgtgattctttccaggtaatgggcaaattcctttctgctcttcctgaaaattcaaagaacgtttattcgatggtaggtttccgtgtaggaaatacattgagcgaaagcggtacggtatctcgtggtatctgtagtacagatgctaaaggattgttgacatctgtagtagaacgtacgaagattcaacgtctggacggtgaagtgaaatatatcggtgatgatggcgaatggacggctactcccgatacgactccggtaagtatgaacttctggggcttcactcctgattacttcgcttacagccaggaattcttcaagactttcctaagcgatccgaagaatatggaaaacctgaagagcgagttcttcatcccattgatggtagataaattgattaatgacggaactgccactgttgaagtactggatactaccagcaagtggttcggcgtcacttatccggaagaccgtcagagcgtagtagacaagattcaggcattggtagatgccggtgaatatcctgctaagttgttctaaagaagagccattgattaagataaagagcagtcattcataagaatgactgctttttttgtttttcataacgtatcatactaagtagtatctaataaatattcagtatctttgcagtccaaaatgttataaatcagaagcagaagtgatttcagtagaaggattatcagtagaatttaatgcgacgccgctttttgaggacgtcagctatgtaattaataagaaagaccgcattgcattggtcggaaaaaatggtgccggcaaatcaaccatgctgaagatattggcaggtttgcagtcaccgacacgcggagtggtagctactccgaaagatgtaaccatcggatatttaccacaggtcatgattctttctgacaaccggacggtgatgggagaagcagaattggcattcgaacatatatttgagcttcaggcgaagttggaacggatgaatcaggaactggcggaacggacagactacgattcggaagaatatcatcagttgatagatcgtttcacgcatgaaaacgaccgcttcctgatgatgggcggtacgaactttcaggcggaaatcgaacggacgcttctcggattgggattcagccgggaagattttgaacgccctacttcggagttttccggtggatggcgtatgcgtatcgaattggcaaaactgcttttacgtcgcccagacgtgcttttgctcgatgagccgaccaatcaccttgatattgaaagtatccaatggttggaaaactttttgtctacacgtgccaatgcagtcgtattagtcagccatgaccgtgctttcctgaataacgtaactacccgtaccatcgaaatttcttgcggtcagatttacgactacaaagtgaaatacgatgagtttgtagtcctgcgtaaagaacgccgtgaacagcaactccgtgcttacgaaaatcagcagaaacaaatacaggatacagaagaattcatcgaacgcttccgctataaagcaacgaaggccgtacaggtgcaaagccgtatcaagcaactggaaaagatagaccgcatcgaagtggacgaagaagataattccgccttgcgtttaaaattccctccagccagtcgtagcggaaactatcctgtgatttgcgaagatgtgcgcaaagcgtatggtagccatgtcgttttccatgatgtcaacttgactatcaacaggggagagaaagtggctttcgtcggaaagaacggagagggtaagtctaccttggtgaaatgtatcatggacgaaattgatttcgaaggtaaattaacgatcggacataatgtacaaatcggttattttgcgcagaaccaggcacaaatgttggatgagaatctgactgtattcgatacgattgaccgggtagcgacaggagatatccgtctgaagatacgtgatatactgggagctttcatgtttggaggcgaagcttcggataaaaaggtgaaagtcctttccggtggagaacgtacgcgattggcgatgattaaacttctgctggaacccgtaaatctactgattctggacgaaccgaccaatcatttggatatgcgttcgaaagatgttttgaaggaagctatccgcgaatttgacggaacagtgattcttgtcagccacgaccgtgattttttggatggacttgcgactaaagtatatgagttcggtggtggacttgtaaaagaacatcttggaggtatctatgaattcttgcaaaagaaaaagatagatagcttgaacgagcttcagaaaggagcgggactgtcggcttctcccacggcttcagctaaaggtaatgaacctgaaaccgttcagccttcggagaataagctctcttacgaagcccagaaagaacttaataagaagattaagaaactcgaacgccaggtggcggactgtgaagcttcaatagaggaaaccgaatccgcgattgctatcgtagaagcgaagatggcaactcccgaaggagcttcggatatgcagctctatgaacggcatcaaaaactgaagcaacagttggatggcattgttgaagagtgggagcgggtttcgatggaactggaagaaacgaaaaactagaacaaaacgcatacttccgagcactatgtgagagaaacgctatacctcgatagaaggtattcctggcgggtatctgtttctcggtgtcgaaacaggtgtttctcgttgaggaacgaggcgttcctcggtgtcggtcaccttcttcctcggtgccggactgcgggtaggatgattgttgattagagagactatttaattatttatacaatatgaaagtaaccaagtatttaccaattcttgccgtatgccttatgacaacaggatgtaacagtaagaaagaggccgtgctgacgtccggtatcgaccttgctaatctggataccacggctatgccgggtacaagtttttatcaatatgcctgtggaggttgggtgaaagatcatccgctgacagacgagtattcacgtttcggtacattcgacatgttgcgcgaaaacagtcgtgaacaactgaaagcattgattgccgaattggcagcgaagaaagataacgcaccgggcagtgctgcgcagaaagtaggcgatctttataatatcgcaatggatagcgtgaagctgaatcaggaaggtgtagctccgatcaaagcagaactggcagccattgacgctctcaaggataaaggagaaatctacgcatatatcgcagagagccagaagaaaggcatccgtccttacttcaccatgtttgtaagtgcggatgatatgaacagttccatgaatatcgtacagacctatcaaggcggtatcggaatgggacagcgtgactattatctggagaatgacgagcagactaaaaatatccgtaataaatatcaggaacatatcgccaaaatgttccagttggcaggttatgatgaggctactgcacagaaagctgtgaaagcagtgatgaacatcgaaactcgcctggcgaaagcggctcgttcacaagtggaattgcgtgatcctcatgctaattataacaagatggatagggcgacgctgaaaaagaacttcccgacttttgactgggatacttatttcaccgtttccggtttgaaagatttggaagaagtgaacgtaggtcagcctgctgccatgaaggaagtagccgatgtgattaataccgtatcactggacgatcagaagctatatctccaatggggattgatagatgctgccgcttcttatctaagcgatgattttgaagcacaaaacttcgatttctacagcagaacaatgtctggaaagaaagaaatgcaacctcgctggaaacgttccgtgagcaccgtagatggtgtacttggcgaagtggtaggacagatgtatgtagagaagtacttcccggctgctgccaaagaacgtatggttacactggtgaagaacctgcaaacttctttgggagaacgtatcaaaggtttggaatggatgagtgaaccgaccaaggaaaaagcgttggagaaactggcaaccttccatgtaaaaataggttatcctgataaatggaaagattactccgcactggagatcaaagatgattcttactgggcaaatatcgagcgtgccaacgaatgggattacaacgaaatgattgccaaagccggcaaaccggtagacaaggatgaatggttgatgactcctcaaacagtgaacgcttattataacccgactaccaatgaaatctgcttcccggcagctatcctgcaacctccgttcttcgatatgaatgcggacgatgctatgaactacggtgcaatcggcgtggtaatcggccatgaaatgactcatggatttgacgatcagggacgtcaatatgacaaagacggaaacctgaaagactggtggacagaagaagatgctaaaaagttcgaagaacgggcacaggtgatggttaacttctttgacagtatcgaagttgctccgggcgtacacgcaaacggtagcctgacacttggagagaacatcgccgaccacggaggtttgcaagtttctttccaggcattcaagaatgcaacagaagccgcaccgctggaaattgttgacggatttactccggaacaacgtttcttcctggcttacgctaatgtgtgggcaggaaatatccgtccggaagagattctccgattaaccaaacttgatcctcactcattaggcaaatggcgtgtggacggtgctcttcctcatatccagaattggtatgaagcattcaaaatcaccgaacaggattcgatgttcgtacctaaagaaaaacgagtatctatctggtaatagtttttgaatagatagcatatatgcgaagaggcgttgattttccgttgaggagagtcaacgcttttttttattaattcacaccttatttattacgtacgataaacaatatttcgtaactttgcacaccaaatacttaataagcaattcaatgtcagagtctaaaagaataaaaactgcattggtatctgtataccataaagaaggtttggatgaaattattaccaaacttcatgaagagggagtagagtttttgtcaacaggcggaactcgtcagtttattgaatcattgggatatccttgcaaggcagtggaagatttgaccacttatccttctattctcggtggtagagtaaagacattacatccgaaaattttcggaggtattctttgtcgtcgcggcctggaacaggatatgcaacagattgagaaatatgaaattcccgagatagatctggttattgttgatttgtatccgttcgaagctactgtagcttccggtgcatctgaagcagacattattgaaaaaatcgatataggcggaatctcactgattcgtgctgcagccaagaactacaacgatgtaatcatcgtagcttctcaagctcaatacaaaccattattggatatgttgatggagcacggcgctacttcttcactcgaagaacgtcgctggatggctaaagaagcatttgccgtttcttctcactacgattcggctattttcaactatttcgatgccggcgaaggttctgctttccgttgctctgttaatagccagaagcaacttcgttacggtgagaacccacatcagaaaggttatttctacggaaatctggaagcaatgttcgaccagattcacggaaaagaaatctcttataacaatcttctcgacatcaacgcagccgttgacctgatcgacgaattcgatgacctcactttcgctatcctgaaacataacaacgcttgcggattagcttcccgtgctacagttttggaagcttggaaagatgcattggccggtgatccggtttctgctttcggaggtgtattgattacgaatggtgtcatcgacaaagaagctgcggaagaaatcaacaagattttcttcgaagtgattatcgcgccggattatgatgtggatgcactcgaaatcctgggacagaaaaagaaccgcatcatcctcgttcgtaaggaagctaaattgcctaagaaacaattccgtgctttgctgaatggcgtattggtgcaggataaagatactaatattgaaacggtagccgacctgaaaaccgtgacagacaaagctcctactccggaagaagtggaagatatgttgtttgccaacaaaattgtaaagaacagcaaatccaacgccatcgtattggcaaaggataaacaacttcttgcaagcggtgtaggacagacttcacgtgtagacgcattgaaacaagcaattgaaaaagccaaatcattcggtttcgacctgaatggtgcagtcatggcttccgatgccttcttcccgttccccgattgtgtggaaattgcggatcaggaaggtattacggctgttatccaaccgggaggttcggtaaaagacgatttatcatttgcttattgcaatgagcacggtatggcgatggtgactaccggtatccgtcattttaaacactaaagcgatttactatttgacaatttacaatttactattcagccgttcggcaatatggatttgattgtcagatagtaataagtatgtatcaaatagtaaatagtaaattgtcaaatagtaaataaaaaaatgggattattttcttttacacaagagatagcaatggacttgggcacagccaatactatcatcatcacgaacggaaaaatcgtggtggatgagccttcggttgtagctctggatcgccgtacagaaaagatgattgccgtgggggaaaaggcgaagttgatgcatgaaaaaacccacgaaaacatacgtaccatccgtccgttgagagacggagtgattgccgacttctatgcctgcgagcagatgatgcgcggtttgataaagcaggtgaatactcgcaaccatttgttttcaccttctcttcgcatggtgattggtgttccttcgggaagtacggaagttgaactccgtgctgtccgtgactctgcggaacatgctggcggtcgtgatgtttatttgattttcgagccgatggctgcggcaatcggtatcggcatcgacgtggaagctccggaaggaaacatgattgtcgatataggtggtggatctacggaaattgccgttatctctttgggaggtatcgtttccaacaactccatccgcacagccggtgatgacctgacagaggatattcgcgaatatatgagccgtcagcacaatgtgaaagtcagcgagcgtatggcagaacgtatcaaaatcaatgtaggtgctgctttaaccgaactgggtgatgatgctccggaagattatatcgttcacggtccgaaccgtatcacagctcttccgatggaagtgcctgtatgctaccaggaagtagctcactgtctggagaaatcaatttcaaagatcgaaactgctatcttgagtgcgttggaaaatacacctcctgaactgtatgctgatattgtgcacaatggtatctatctctccggaggtggtgcattgcttcgcggactggataagagattgaccgataagatcaacattcctttccatattgcggaagatcctttgcatgcagttgccaaaggtacaggagtggcattgaagaacgtagaccgtttctctttcttaatgagataaaccggggatgaggaatttattaaacttccttctgaaatacaattactggttcctcttcatcttattggaggtagccagttttgttttgttatttcggttcaaccgttatcagcagagtgcattcttcacttctgccaatacggttgtgggggcagtttatgaagtttcgggagggatttcctcttattttcatctgaaatcagtcaacgaagatctattggatcgcaacatggtgctcgaacaacagatcactaatctggaaaaagcattgagagagcagcagctcgattctatggcaatcaacagcatccggcaggtgccgcaagcggattatcagttgtttaaagcgcatgtgataaagaacagtttgaatctggttgataattatatcacgctcgataaaggttcctcttccggtattcgctccgaaatgggagtagtggacggtaatgggattgtagggattgtttatgaaacatctccttcctactcggtggtgatttcggtactgaacagcaagtcgaatatcagttgcaagattatcggcagtgattatttcggctacctgaaatgggaacatggagattcgcgctatgcttatctgaaagacttgcctcgtcatgcagagtttaatttgggagatacagtcgttaccagtggtttctccactgtctttcccgaaggtataatggtggggacggtagatgatatgtccgactctaatgacggactttcctatctgttgaaaatcaagctggctactgatttcggtaagttgagtgacgttcgggtggtagcccggacaggtcaggaagaacagaagaaacttgaaaataaggtgatgaaagaatgattattacttatatacatagaatcggatggtttatcggcttggtacttcttcaggtgctaatccttaatagtgtacatattgccggctatgctactccttttctctatatctattttattctgaaattcagctccggcacttcccggaatgaactgatgttgtgggcttttttcttcgggctgaccattgatatattctccgatactccgggaatgaatgcggcagctaccgtattgcttgcctttctccgtccctctttgcttcgtctgttcatgccccgtgataatccggacagccttattccctctttcaagacgatgggaatcagtcctttcttaaaatatactactgcaagtgtttttgtgcacagtctggcattactctccattgagttcttctcatttaccagcatttggctgttactgttgcgagtgcttctttgcactattctgactgtaacctgtatcatagctatagaagggattaagaagtaacgatggcaaaagattatatcttagagaagcgcaaatttgtaatcggaggcattgctatctccattgttttgatttatctgatacgtctttttgtattgcagatcacgaccgatgactacaagaagaatgctgacagtaacgcttttctgaataagatccaatacccctcgcgtggtgctatttatgaccggaccggtaaactattggtattcaaccagccggcatacgacataacgatcgtgccaaaggaaatagagaatctggacacactcgatttatgccaatcgctgaatatcacccgtgcgcagtttctcaaaataatgagcgacatgaaagaccgtcgccgcaatccggggtattcccgctataccaaccagttgtttatgtcgcaactttcggcggaagaatgtggtgtctttcaggaaaagctgtttaagtttcgtggcttttatatccaacggcgtaccattcgtcaatattcgtacaatgctgccgcccatgctttgggagatataggagaagtctccgcaaaagaaatggaagcggatgaagaaggatactacatccgtggggattatgtcggcaagttaggagtcgagaaatcgtatgaaaagtaccttcgtggcgagaaaggaattgagattctgcttcgtgatgcacacggtcgtatccaagggcattatatggatggtgaatatgaccgtccttccgttcccggcaagaacctgacattgagtctggatattgacttacagatgctgggtgaacgtttattaaagaataagattggaagtattgtggctatcgaaccggagaccggagaaatcctttgtctggtatcctctcccaattatgatccgcatttgatgattggccgccagcgtggtaagaaccatctggctttgcaacgtgatatgactaaaccgcttttgaatcgtgccctgatgggagtgtatcctccgggatctacgttcaagacagcgcaaggactgacgttcctgcaagaaggaatcatcactgaacaaagtccggcattcccttgttcacatgggttccattacggaagattgacagtaggctgccatgctcacgggtctcccttgccattgattccggctattgctacatcgtgcaactcctatttctgttggggattgttccgtatgtttggcgaccgtaaatacggttcgccgcaaaacgccattacggtctggaaagaccacatggtttcgcaaggatttggctacaaactgggagtagatttgccgggagagaaacggggcttgattccgaatgcgcagttctacgataaagcctatcgcggacattggaacggactgacagtaatcagtatctctatcggacagggggaaattttatccactccccttcagattgctaatctgggagcaaccatagctaacagaggatactttgtgacaccgcatattgtaaaggaaatccaagataatcagttggacagcatctatcgcgtaccacgctataccactattgagaaaagacattatgaatcagtcgtagaagggatgcgtggcgcagctaccggaggaacttgtcgtatgctgtcagtgatggttccggatttggaagcctgtggaaaaacgggtactgcgcagaatcgcggacacgaccactcggtatttatgggctttgcgccgatgaacaaaccgaagatagctattgccgtctatgtagagaacggcggatggggggctacttatggagttcctttcggcgcactgatgatggaacagtatttgaaaggcaagctctcgccggaaaacgagttgagggcggaagaatttagtaacagagtgatattatatggtaacgaggaacgatagtttgtggaaaacgctggactgggtaacgatttttatttacctgctcctgattgttggcggatggtttagcgtctgcggagccagctatgactatggcgaacgcgacttcctcgacttctcaacccgtgccggcaagcagttcgtgtggattatctgttccttcggactcggattcgtgctgttgatgctggaagaccgtatgtatgatatgttcgcgtacattatatatgtggggatgattctcttgctcattgttaccatcttcatagcaccggacaccaaaggatcacgctcttggcttgtcatggggcctgtgagcctgcaacccgccgagtttgccaagttcgctacggccttggcgttggctaaatacatgaattcttattcattcagtatcaagaaagaaaagtgtgcctttattctgggattcatcattcttctcccgatgttattgattatcgggcagcgggagacaggatctgcattggtttatcttgctttttttctggttctttatcgtgaaggaatgccgggagtagtgctttttgcgggcgtatgtgcggtaatctactttgtggtcggcatccgttttgatgaagtctttatcgccgatactcctacaccactgggagaatttatcgtattactattgatcttattatttgccggtggtatggtgtgggtatatcgcaagaaatggtctgctacccgcaatatcattggtggaagtttggctatattattgattgcttatttaatatccgaatattgggtacattttagcctcgtttgggtgcaatgggcgctttgtattgtggtgataggctatctgatttatttggcattaagtgagcggcagcgtacttatttcctgattgccctgtttacaattggttctgtcggcttcctgtattccagtaactatgtatttgataatgtgctcgaacctcaccagcaagtccgtatcaaagtagtgctcggtttggaagaagatttgaccggtgccggatacaacgtgaatcagtccaagattgccatcggttccggtgggttgacaggaaaaggattcctgaatggtacgcaaacaaaattaaagtacgtgcccgaacaggataccgactttatattctgtacagtgggtgaggagcaaggatttgtcggctcggctgctgtcctgttggctttccttattttgatcttacgattaatcttcctgtccgaacggcagacttccaactttgggcgggtttatggatattcggttgtcagtattttccttttccacttatttattaatatcggtatggtgctggggttaactccggttatcggtattccattgcctttcttcagctatggaggttcttctttatggggatttacgatattgctgtttatcttcctgcgtattgatgcaggacgtggcagaagactctaatcttactgcttctcaatacggatacctacatcgctcaatccttgtaacttttcatctttcattccgctcataattttaatagtataatttgtaggatgtaaagggcgaacagatgtaataaaagtttccgattggtaaatgcttccccatccgtgtcccgtccatcttccggtagagtcagccaggcagaaagcaatggtatcagtgcgccataccgtagaatcctgtagattctgactgataaataaatggaggttatgataaggatattcgatactgttgcggacttccgcaaaaagccggagagtagtgggaacgctgtcagttatgggaatctgaaaagagagtgtatcactctttccccatcccttgttgggaagggattgataagagtgatacactgtatgttcattgcaggctgtcagtaagcaagcgctgaatagactcaatatactattcttgagtaggcttttcattagttgactgtttctcctgattctgatttctttccggtctggaaggacgctcgtggttgggacggcgttcttgacgttcctgcccttgctgttcccgttgacggtcttgttgttgcggacgttcctgattcgaccgttcctgtccttgtggacgttcttgatttgatcctctttccggacgtctgttttcgttgttccgtccctggttttgtcctctgttccggttgttgttattgttatttctcgggcggttgtctctttcccctctgttgccgttttctggctgttgcgggcggttttcattctcccgttgaggtgttgcggacgattgccgccttctgcttgctgttgcgggcggtttccgttattattgtttccttttttcttctttttattattccggttagcgttattgccgccctctttattattccggctgcggtcgaaacgggtaacactttcctgttccagcaaatcaactggttttcttggttccggtttcttttcttcttcgagcaagctgtccggtttcatccctttcttattcatggagattacttcaaacgcacgtttgccgctgatagtgaccagattggctgggaagtttttatccgtagaataagaaacctgattgcttagaatatccgctttgaagaaatagaaagtgccatctttcgtttccaactctatctctcttgaagggagacgtttttgagcttccacataacagtccacctcgtagttcagacagcatttcagcttagcgcactgtccggcaagtttctgcggattcaatgagatatcctgaaaacgggctgcactggtagaaacagagacgaagctcgtcatccatgtagcgcagcaaagttcgcgtccgcaaggaccgatcccgccgatgcgtcctgcttcctgacgggcaccgatttgtttcatttcgatacgtacgcggaatgcttcggccaatactttaatcagttgccggaagtctacccgctcatcggcgatatagtagaaaatagctttgttgccatctccctgatactccacatcaccgattttcatatccagattgagattcaacgcaatctgacgcgcacgaatcatcgtagcgtgttctttggctttggcttcgttgaacttttccatatctaccggcttagctttccgatagacacgcttgatttccgtatctgctttgaagtttgctttcttcatttgcaggggaacgagccggccggtcaatgtaaccacgccgatgtcatggccgggagccgcttcaacggcaactacatctcctttttccagtttaatcttgttgctgttccgaaaatatcccttccgggtatttttgaattgcacttccaccatgtcactctcttccgcattgcccggaatgtccgccagccaatcgtaggtgttcagctttttatcttgtcgggagcatcctttgcagcaaaggccaccgcttccattatgaagtttatattccataagtttatatatttattattgcttcaacagtacaatcatcttcagcgagaagtcgaagaataccattttagcatttacattctgttctatatgtagttgcgcttcgctcagttcgtccatgatacccatcacattccgttcgttgacaaaaggcgcaaagcgggttgcaaaattctgttcattaatcgtcatatacgtcaaattgcgctggtgcaggttgaagacaaagttttcgcggatcatgcgctggcaatattccagaaagtttttctggcgttcgcgtcccatgctggccacctgttcgctccacatcttcatctcctttattttccgttgataggacaagcgcatcaggttgacgaagagctcgaagaataactgattttcctcattcagatgaatcgtttcgagtgccttgacgaaatttccgtttgccagatgggcaatcgaaatgctatccgcaggctgaacatgatatttactctgcaatacccggtcgatgctggcttcgtcaattttccgcacattcatacgttgagtacggctcaaaatggtaggcagaatcatgtccggagcttcggataccaacagaaaaatcgtcttttcgggtggctcctcaagcagtttcagcaacttattggcgcataccgggtgcattttctccggcaaccatacaatcgtaatcttaaatccaccttcactggatttcagactgagcttcttcaggatctcatcgctctctttggcataaatcagcgcttgcgagttctccgcgtccatttcacccaaccaatggttgaggttaaaataaggattgttaataacgaatggccgccaatcggcaatataatcatcgcacacttctttctttcctttcgcacttttcacgatggggaatacgaaatgcacatccggatgtaccagcttattgaatttcacacaagacggacagacaccgcaagcatcttcctcgccccgattggtgcaactgatgtagcgtgcgtatgcgatagccaatggcattttaccaactccctcgggaccgcaaatgagttgggcatgtggaatacgcccctcgttcacttcctgaatgagtcgttgcttgatttcttcttgtccgattacgtctctgaaaaacatatcaataaatgattttggctatttccttgatactgtctactgctccgatagaatagaaatggatgctcggaactccgtgttccatcaactccttgcattgagccacgcaccattcaacacccacctgttcggcttccgcatcattcttgcatttcaatgcttctttcaccagatcttccggtaaatccaccttgaatgttttggggatcatgcttagttgggagattttcttgaaaggcttgattcccggaatgataggaatgttgatacctgctgccttagcctgctccacaaaatcgaaatatttcttattatcgtagaataattgtgtcacagcatactctgcaccagtttctaccttctttttcagccagtaaagatctgtctctatgttaggagattcttcatgcttttccggataacacgccacaccatacgagaaaggactggcggtgactttcatctccgaaccgtcaacgaagattcccttattgaaattattaatctgctcctgcaattcaatcgcatgatgatatccgtctccttcgggagtaaataccgattcatgtttagccttgtctccacggagtaccagcaaatctgttatattcagaaattgcaaatccagcaatacatattcggtctcctcacgcgtgaaaccactgcacaggatatgaggaaccacagtaatattatatttattctgaatggctgccgccacagcgactgttcccggacgccttctcaggcggtttctctgaaagagcccgttgccgagatctttgtagacatattcgctgcgatgcgtggtgatattgatatatttcggatcaaattctcgaagagtgtcgattgtctgatagagcttttcgattccggttcccttcaaaggagggagaatttcgaaagaaaaagctgtacctttactgttatttattaaatcaattactttcattccttttcgttgatgttgttatctacttggattaaacatgcatattgggacaaaaatacgaaaaaagaaagatttcttcttgatttgtttgaaaatagtttggtttttatcgtactattacataaaagagggcatatcctgtatttcggatgcaccctctctcacctaatcattattaaattagaatttacttttcgagaaatgatttcttcattctggcaatgtcagtcagataatcttgtaaatcttgttcatgttcttcctcttcggcaagaatatgtttggcgatatcacaagtggtgaaatctttcccgttagtaaagtcggcaatttcctgataacggagaatggcacagcgttcggaagcaacattatccttcagcaaactgactgaatcgaagccttgcggagcatcatatttgcatcttgccagttcgaaccattgtttcggatcaagtaccggaaccccttccagctcgatgatacggtcggcaagcagctgtgcatgtctacgttcttcttcggcatgttcctcgaactcaccttgtacgtcggcacgcatggcgccttccactactaatgcacctacccaatattggtaatatgccaaccactcttcagccaatgctgcgttcaattgtgaaattaaactttctacatctaatttaccttgtaggatttttacactttctctagccataattttaaagtttaggttactatgtttaaatcgctaatgtaacagacggaggttctttttgtttgagtatcccggaggttttaacagaaagaatgcattgcactgtgcagctccttcttttttaatagaacatggatgcttttaatatttcatttcaactaaatttttgtatcacttttaccctcacatcctcacaccttcgctcaattcctttattcatcgtggttacaacgtgtgagggtaagtgcggtagtagggtgagggtaactttttaccctcaccctgtcttgtcctgattctatcttaaacagtttataataagtgtcttgtctattcgcttttatcttatactctcctatacaatagacgtcaatgccttatataatagatgtttatccctcgtgattcttctgataagccctaatgtcttttaacggctcactgcagtgaacgaatttgtttactatcgttagcttatttgtttacatctgatagcttatttgttcactgcagtgagcccttgccaactactaagcaaatggatattgaacataagaagaaagcctatgaagtggcatatcttataaagaaagatacctgtatgctgaaattaggatagtaatttatttattgattagtaggagcgaattataaactaaagtagagtgataacagatagctattctcacttttttatgtgttcttgtcctgtagaaatctattttttagtttgtttctttaagagtacttctctttttaccctctctttgcgaatatctttttgttatttgctctacacgcgcgtatgtaatataataatgtaccatttccggcctgttttcatatagatgtaacatatatgaagaaaaatatgttctacaacatcgttatgattcagtaagttagggcggatatctaaaaataattagaaaaaatagtcagatatatttggatgttatagataagttgtctacttttgcacccgctttgctagagagacagagcctaatgattgacattctgctataagatgaaggccacagaaaataaaaacaaaaaaactttgaaaaaagtttggaggttatctgaaaaagtccttatctttgcatccgctttcgcaaagaaagcaggcgcggcggaagccacgttagttctttgaaatattgataaacaatacaagtagtacaagtaaaaaaatagaaccgtcaatacttgtcttattcagtagcgatacagttaagactaataggtatttgaataaggtcaataaatttacggcgtcctgaacagagcaaaaaagtcatcctaagggatgataaaaaatacttttacaatgaagagtttgatcctggctcaggatgaacgctagctacaggcttaacacatgcaagtcgaggggcagcattttagtttgcttgcaaactgaagatggcgaccggcgcacgggtgagtaacacgtatccaacctgccgataactccggaatagcctttcgaaagaaagattaataccggatagcatacgaatatcgcatgatatttttattaaagaatttcggttatcgatggggatgcgttccattagtttgttggcggggtaacggcccaccaagactacgatggataggggttctgagaggaaggtcccccacattggaactgagacacggtccaaactcctacgggaggcagcagtgaggaatattggtcaatgggcgagagcctgaaccagccaagtagcgtgaaggatgaaggctctatgggtcgtaaacttcttttatatgggaataaagttttccacgtgtggaattttgtatgtaccatatgaataaggatcggctaactccgtgccagcagccgcggtaatacggaggatccgagcgttatccggatttattgggtttaaagggagcgtaggtggattgttaagtcagttgtgaaagtttgcggctcaaccgtaaaattgcagttgaaactggcagtcttgagtacagtagaggtgggcggaattcgtggtgtagcggtgaaatgcttagatatcacgaagaactccgattgcgaaggcagctcactagactgtcactgacactgatgctcgaaagtgtgggtatcaaacaggattagataccctggtagtccacacagtaaacgatgaatactcgctgtttgcgatatacagtaagcggccaagcgaaagcattaagtattccacctggggagtacgccggcaacggtgaaactcaaaggaattgacgggggcccgcacaagcggaggaacatgtggtttaattcgatgatacgcgaggaaccttacccgggcttaaattgcaacagaatatattggaaacagtatagccgtaaggctgttgtgaaggtgctgcatggttgtcgtcagctcgtgccgtgaggtgtcggcttaagtgccataacgagcgcaacccttatctttagttactaacaggttatgctgaggactctagagagactgccgtcgtaagatgtgaggaaggtggggatgacgtcaaatcagcacggcccttacgtccggggctacacacgtgttacaatggggggtacagaaggcggctacctggtgacaggatgctaatcccaaaaacctctctcagttcggatcgaagtctgcaacccgacttcgtgaagctggattcgctagtaatcgcgcatcagccatggcgcggtgaatacgttcccgggccttgtacacaccgcccgtcaagccatgaaagccgggggtacctgaagtacgtaaccgcaaggagcgtcctagggtaaaactggtaattggggctaagtcgtaacaaggtagccgtaccggaaggtgcggctggaacacctcctttctggagcgatgccgtaactgtcacaaaacgtggcagccactaaaagactttaaaggttctgttttttgtactactggtacttgtttatttataacatatagatcaaccatctatagaagtatagatagagataaacaagagaaaaagaagccgagtctagacgaaaggtagacaaggttgaactagtcctatagctcagttggttagagcgctacactgataatgtagaggtcggcagttcaactctgcctgggactaccaagctcaagaatgaggaacagggaaagctaaaagctaaaaaacaaaattcttgataacctcttgggggattagctcagctggctagagcatctgccttgcacgcagagggtcaacggttcgaatccgttattctccacgatctctgaaaaagagaaacgatctttgacatgatgtacaaaaagtaaaattttagtaagagctaaaagtatatatcaaaccgtacgtgttcgagtatgcaatattgatagaaggaagcattccactaccaataccagtacgagaataaaacgtttgaaagaaagtaagcaagggcgcatggcggatgccttggctctcggaggcgatgaaggacgtgataagctgcgataagcttcgggcaggtgcaaataacctttgatccgaagatttccgaatgggacaacccgtcattctgaaggaatgacatcttgcatagcaagaggctaacgcagggaactgaaacatcttagtacctgtaggaaaagaaaataataatgattcccctagtagtggcgagcgaacggggattagcccaaaccaatgttgttacggcaatattggggttgtaggaccacgatgtcgcaagaaatttagtgagaagaattctttggaaaatgaaaccatagacggtgatagtccggtattcgaagctaaatgaagcgtagtggtatcctgagtagcgcgggacacgaggaatcttgcgtgaatctgccgggaccatccggtaaggctaaatactcccgagagaccgatagcgaaccagtactgtgaaggaaaggtgaaaagcacttcgaatagaagagtgaaatagtccctgaaaccgtgcgcctacaagcggtcggagctgtgtaaacagtgacggcgtgccttttgcataatgaacctacgagttactttttccggcaaggttaaggatcttgagatccgcagccgaagcgaaagcgagtcttaacagggcgattagtcggaaggagtagacgcgaaaccaagtgatctacccttggtcaggttgaaggttaggtaacactaactggaggaccgaaccgataagcgttgaaaagcttccggatgaactgagggtgggggtgaaaggctaatcaaacttggagatagctcgtactccccgaaatgcatttaggtgcagccttgggaattactactgtgaggtagagcgactgataagatgcgagggcttcaccgcctatcaagtcttgataaactccgaatgcgcagtagttcgatcccaggagtgagggcatgggtgctaaggtccatgtcctaaaggagaagaatccggaccatcagctaaggtcccgaaataattgctaagttgaactaacgaagtcagattgctaagacagctaggatgttggcttggaagcagccattcatttaaagagtgcgtaacagctcactagtcgaggagtttggcgtggataataatcgggcatcaagcaatttaccgaagctatgggatcagtaatgatcggtaggggagcattccactctgcgtcgaaggtgaagcgtgagctttgctggagcgtgtggaaaagcaaatgtaggtataagtaacgataaagggggtgagaaaccccctcgccgaaagactaaggtttcctgatcaacgctaatcggatcagggttagtcgggtcctaaggctcagccgaacggtgaggccgatggcagaacaggttaatattcctgtactaccttaaagagtgacgtggagacggaggagtgacagcgccgcggactgacggaatagtccgttgaagggtgtagatgttgattatcccaggcaaatccgggataagagtcgaacctgatagtataccaaattcttcggaataaggtaatagtgcgtgtaagcatactcccaagaaaatccgctaaacttaatctttaaggtacccgtaccgcaaacggacacacgtagtcgggttgaatatactaaggcgcttgagtgattcacggttaaggaactaggcaaattgaccctgtaacttcgggataaagggtcccaacgagagttgggcgcagagaataggtccaggcaactgtttaacaaaaacacagggctgtgccaaattgaaagattacgtatacagcctgacacctgcccggtgctggaaggttaagaggagatgtcatcgcaagagaagcattgaattgaagccccagtaaacggcggccgtaactataacggtcctaaggtagcgaaattccttgtcgggtaagttccgacctgcacgaatggtgtaatgatctggacactgtctcaaccgtgagctcagtgaaattgtagtatcggtgaagatgccgattacccgcgatgggacgaaaagaccccgtgaacctttactatagcttaacattgaatttgggtaattgatgtgtaggataggccggagactttgaagcaggtacgccagtatttgtggagtcgctgttgaaatacggccctttgattatttgagttctaactcgttgttgcgaggacactgtttggtgggtagtttgactggggtggtcgcctccaaaagtgtaacggaggcttctaaaggtgccctcaggacgattggtaaccgtccgtagagtgtaatggcataagggcgcttgactgggagacagacaagtcgatcaggtaggaaactagagcatagtgatccggtgtttccgtatggaagggacatcgctcaaaggataaaaggtactccggggataacaggctgatccctcccaagagctcatatcgacggaggggtttggcacctcgatgtcggctcgtcacatcctggggctggagaaggtcccaagggttgggctgttcgcccattaaagtggcacgcgagctgggttcagaacgtcgtgagacagttcggtctctatctatcgtgggcgtatgaaatttgcgtggctctgacactagtacgagaggaccgtgttggactgaccgctggtttaccagttgtgccgccaggtgcattgctgggtatctaagtcgggattggataagtgctgaaagcatctaagtacgaagccagccacaagattagatttcttagggtcgtcaaagacgatgacgttgataggatgcaggtgtaaaggtggtaacatcaaagccgagcattactaattgcccgttcactttctttcggacatgtaccggttgggtatatacgtttagctttctagacactgaaattttacttttcatcatgtcataaccttcttcaggtggttatagcacgagggttccacctcttcccattccgaacagagaagttaagcctcgtcacgccgatggtactgcgtaacagtgggagagtaggtagccgccgtttttaagaagcctcgcttgtctattggacgggcgaggctttctgttttttattactttggtatttatatcgccgtttttaacagatacaaacctcctaatacctattaaaaaagtgaatatttactgataatttgtatgttatgaggatatttatttgtatctttgtcgcccgaattgtaagctaacgatttaaaaaagagagaagctttgggaaagtttgataaatacaaaattgacttgaaaggaatgcaaacagactctgctaagtatgagtttgtattggataacctttacttcgctcacattgatggtcctgaagttcagaaaggaaaggtgaatgttacattgaccgtgaaaagaacctctcgtgctttcgagctgagttttcagactgagggaatggtatcagtaccatgtgaccgttgtctggatgatatggagctacctatcagttcttctgataaactgatggtaaagtttggacatgaatatgcagaagaaggtgacaacctgattgtgattcccgaggaagaaggggaaatcaacgttgcatggttcatgtatgagtttgttgcgctctctgtacccatgaagcatgtacatgctcccggtaagtgcaataaagcgatgactggtaaattgaacaagcatttgaaaacaaatgcgaatgaggatagcgatgatactttcgacacaggtggagatgacatcgtaattgaggaagaagtggaggaacaaattgatccccgctggaatgaattaaaaaaaatattagataataattaaagttttaagaaaatggcacatcctaagagaagacaatcaagtacgagacaagcgaagagaagaactcatgataaggcagtagctcctacattggctatttgtccgaattgcggtgaatggcacgtttaccacactgtatgtggtgcttgtggctattacagaggcaagctcgctattgagaaagaagcagctgtataattagtacagttatactgaaaacagcctgggggtgaaactctccggctgctttaagtattatagtattgctaatttaaaataggtttgatggaaaaaataaatgcagtaatcacaggagtcggcgggtacgtacccgattatatcttgactaacgacgagatatcaaaaatggtggataccaacgacgaatggattatgactcgtatcggagtaaaggaaagacatattctgaatgaggaaggattaggtagttcatacatggcacgcaaagctgccaaacagttgatgaagaagactggtgctaatcctgatgatatcgatttggttgttgttgctaccactactcctgactatcacttcccttctacagcttctattctttgtgataaactcggactaaagaatgcttttgccttcgacttgcaggctgcttgtagcggattcctgtatttgatggagacagctgctaatttcatccgttcgggaagatataagaaaattatcattgtcggtgccgataagatgtcgtcaatggttaactatacagatcgtgctacatgccctattttcggtgacggtgctgctgcctttatggtggagcccactacggaagattacggaatcatggattcgatactgagaacagatggcaaaggtttgcctttcctccacatgaaagctggtggttcggtttgtcctccgtcttatttcacagtagacaataaaatgcactatctgtttcaggaaggaagaacagtatttaaatatgctgtatccaacatgtcggatgtctctgctgcaatcgcagaaaagaatggtctgacgaaagatagtatcaactggattgttccgcatcaggcgaatgtccgtattatcgaggctgtggctcaccgtatggatgtgccaatggataaagtgttggtaaatattgagcattacggtaacacgagtgccgctacacttcctctgtgtatctgggattatgaagataaactcaagaaaggcgataacatcattttcactgcattcggtgccggatttacttggggtgcagtgtacgtgaaatggggttatgatggaaagaaggaatcgtaacgtaagttactgaattataacactcaaaaacgcatcctatttcgattcgatgcgtttttttgtctcaaccaataaaataaagagaaatgcataaagcaggttttgtaaacatcgtaggaaatccgaatgtcggaaagtcgacattgatgaatgtcttggtgggcgaacgtatttcgatcgctaccttcaaagcacagactactcgtcaccggattatgggaatctataatacggatgagatgcagattgttttttctgatactccgggtgtgttgaagcccaattataagctacaggagtctatgctgaatttttctacttcggcattgacggatgcggatatcttgctttatgtaacggacgtggtggagacgccggataagaataatgagtttatggaaaaggtgcgtcagatgacggtgcctgttctcttgctcatcaataagatagatcttacagatcaggaaaaactggtaaagctggtggaagaatggaaagagttgcttccccaagccgaaattattccgatttctgctacatcaaagttcaatgtagactatgtgatgaagcggatcaaagaactgctgcccgattctcctccttattttggaaaggatcagtggacggataagcctgcccgtttcttcgtgaatgagattatccgggaaaagattctgctctactacgataaagagattccctattcggtggaggttgtcgtggaagagtttaaggaagaaccgaagaagattcatattcgggcggtgattaacgtggaacgtgattcgcagaaaggaatcattatcggtaaacagggaaaggcgttgaagaaggtggctaccgaggctcgccgtgaactggaacgtttctttggaaagactattttcctcgaaacgtatgtgaaagtggataaggattggcgtagttcggataaggaactccgcaattttggttatcagttagattaagagtattcatgagactgtgatagtcgtgaaaaaacaaggtattgaactatgggtaatttagttgcaattgtaggacgcccgaatgtgggcaagtctaccttatttaaccgtctgacgaagactcgtcaggctattgtgaatgaagaagcgggtacaacccgcgacagacaatatggcaagtctgagtggctgggccgtgaattctctgtggttgacaccggtggatgggtggtcaactcggatgatgtctttgaagaggaaatccgtaagcaggtattattggctgtggaagaagcggatgtcattctgtttgtagtggatgtgatgaatggagtgactgacttggatatgcaggtagctgctattctgcgtcgcgctaatagtccggtgattatggttgccaataaaacggataatcacgatttgcaatataacgctcccgaattctataaactgggattgggcgatccgtattgcgtttctgccatgacaggaagtggtacgggtgatttgatggacttgattgtcagcaatttcaagaaagaatcatcagaaatcctggatgatgatattccccgttttgctgtggtagggcgtccgaacgccggaaagtcttccattgtaaatgcatttattggggaagaacgtaatatcgtaacagagattgccggaactacccgcgactctatctatactcgttacaataaattcggatttgatttttacctggtggatacagcgggtatccgtaagaaaaacaaggtaaatgaagacttggaatattattcagtcgttcgttcgattcgttctatcgaaggttcggatgtttgtattctgatgttggatgctacaagaggtgttgaggggcaggacttgaatatcttctctctgattcagaagaatcagaaaggtctggtagttgttataaataagtgggatttggtggaagataaatctgtgaaagtacagaaagcgtttgaggaagctgttcgctcgcgttttgctccgtttgtcgatttcccgatcatctttgcttctgcactgactaagcaacgtattctgaaagtgcttgaagaagcacgtagtgtgtatgagaaccggacgacaaagatcccgaccgcacgtttgaatgaagaaatgcttccgttgatcgaggcttatccgcctccttcaaataaaggtaagtatatcaaaattaaatatatcacacagttgccgaatacacaggtgccttcatttgtgtatttcgccaacttaccgcagtatgtgaaagagccatataaacgtttcctcgaaaataagatgcgtgagaaatggaatctgacaggtactccggttaatatttatattcgacagaaataaataaaaaagacacggattgtctcaattatatagaatatatagagagacaatccgtgtctttttataaatatatctctgtgagatcttgtattactttgtagtagacttatttttccaactggaaatcttttcggcgtaacacgaagctgttactcaagtatttttcacgtacaatctgattttccgataattcttccggtgttccctggaaaaggatctttccttcgaacagcagataggcgcggtctgtgatactaagcgtttcttgtacgttgtggtcggtaatcaggattccgatattcttgtctttcagtttccatacaatttgctggatatcttctacggcaatcgggtcgacaccggcaaaaggttcgtcaagcatgatgaatttggggtcgatggcaagacaacgggcaatctctgtacggcggcgctcacctcccgacaactggttacctttatttttgcgtaccttttgcagacggaactctgcaatcaggctttcgagtttctctttttgatattctttgggcttgttggtcatttccagtacagaggcgatattatcttccacgctcatctggcggaaaacggaagcttcctgtgcaaggtagccgattcccgtttgtgcgcgtttgtaaaccggatatttggtaatctccaggtcatcgaggaaaatacgtccttcattaggagtaatcagccctacagtcatatagaatgaagtcgtcttaccggcaccgttcggtcccagcaaacctacaatctcaccttgcttcacattgatggaaacgtggcttacaacggttcgtttaccgtacttcttaaccaggtcttccgtgcggagcaccatcttgctttcttccatattctagttattttgcggcaaatgtagtaaaaataagctgaaataatgtacatttgcagacaaatagtgtgagttatgataaaagcattgagaaccgtcgggagatatttcatgctgatgggtcggactttttcccgccccgaacgtatgcgtatgttcttccggcaataccttaacgagttggagcagctaggtgtgaactccatcggtattgtgctgttgatttcgtttttcatcggcgcagtgattaccatccagattaagttgaatatcgaaagtccatggatgccccgctggacagtgggatatgtgacacgtgaaattatgttgctggaattttcttcttccatcatgtgtttgattcttgccggaaaagtcgggtcgaatatcgcttcggaattaggaacgatgcgggtgacgcaacagattgatgcgctcgaaattatgggtatcaattcggcgaactacctgattttgcctaagattacggcgatggtgactgttattcctattctagtgacgtttagtatctttgccggaatcatcggtgccttttgcacgtgttggtttgccggggttatgaatgctgtcgatctcgaatatggtttgcagtatatgtttaacgaatggtttatctgggcgggtatcatcaaatccctcttttttgcgtttataattgcaagtgtgtccgctttcttcggatacacggtagagggaggttcgattgctgtaggaaaggcttctacggatgccgtagtatccagcagtgtattaattctgttttcagacttgatattaactaaacttttgatgggatgattgagattaaaggactttataaatcatttgatgacaagacagtattgagtgatattaatgctgactttgcaaatggaaagacaaacttgattatcggtcagagtggttccggtaagacggtgttgatgaaatgtattgtaggattgttaactccggagaaaggggaagtcttgtatgacggacgtaaccttgtgctgatggggaagaaggagaagaagatgcttcgcaaggaaatgggaatgattttccagagtgcggctctttttgactctatgaccgtatttgataatgtgatgtttccactgaatatgtttagcaacgatatcttgcgtgaccggattaaacgggcgatgttctgtctggatcgtgtgaatctgggggaagcgaaagataagtttccgggagaaatcagtggtggtatgcagaagcgtgtggctattgcgcgtgcgattgccttgaatccgcaatatctgttttgcgatgagccgaactcggggctggacccgaaaacgtcattggtgattgatgatctgattcatgatattacgcaggaatataacatgacgaccattatcaatacgcatgatatgaactctgtattgggaattggtgagaaggtgatttatatttatgagggacataaagagtgggaaggtacgaaagatgatatctttacttctactaatgaacgactgaataactttatctttgcttccgacttgctccgtaaggtgaaggacgtggaagtgcagggaatggaagggtaataaaaaaacttctgtcatcgggtgacagaagtttctttttttcttagctatgttagcgtcggcaattaagctctaggtctagcttctttaactaccattgtacggcccatgtattcagctccgttcaattcagcaatagcttttgcagctgcagcgtcgtcttccatttcgatgaaagcgaatcctttggatttaccggtttcacggtccataacaactttaactgatgatactgctccgtaatcttccatcacttgttgcagatctccttccttaacacggtagttaaggtttccaacataaatgttcataatgaaaatgataaaaaataaataaatgaataaaactctctggatagatggttactaataaaaagattaaaacgacagagagtttacaaatgcgttttggtaacggaagtaaaaaccttgtaatcaaatcgagaaactaatggtccatcaatccgcaacaaagaaaagaataatttttggattaaccatctttttggaaagttaatttgcggattatcagaaaaaaagtaggccgggggaacctggcggggtgggtgttgatggtgattttatcttgtttatagatggaatatcagtgaaatatcgataaaagatgtgtgaaagatgggtggcgttgctgaaataaatctgcaatgtcttttgaaatttgaaagattagcactaattttgcaccctctttgagtatagaacaaagtataaatcaaataaataattgtcagaatgaacgtttcattacaaaacattgacaaagtaagcgcagagcttactgtaaagcttgagaaagccgattatcaggagaaagtagacaaagagttgaagtcactccgtcagaaggcacagattccgggattccgtaaaggtatggttccgacaagtcttattaaaaagatgtatggtaagtcggtaattgcagaggttgtgaataaggcactgcaagaagctgtttacaattatattaaagaaaataaggtgaatatgttgggcgagccgttgcctaacgaagaaaagcaacagaatattgatttcgatacaatggaagaattcgatttcgtattcgacattgctttggcacctgaatttaaagcagaagtaagtgctaaagataaagtagattattatactatcgaagtttctgacgaaatgatcgacaaccaggtgaagatgtatactcaacgcactggcaagtatgataaggtagacgcttacgaagataatgatatgctgaaaggtctgctggcacagttggacgaagaaggcaacacaaaagaaggtggtatccaggtagaagctgcagtattgatgcctgcttacatgaagaacgacgatcagaaagctatttttgctaatgcaaaagtaaatgatgtattggtgttcaatccgaatgtggcttatgacggacatgctgctgaactgggttctttgttgaagattgacaaggaaattgcaaaagacgtgaagtctgatttcagcttccaggtagaagaaatcactcgttttgttccgggtgaattgactcaggaagtattcgaccaggcattcggcgaaggtgttgtgaagactgaagaagaattccgcgctaagattaaagaagaaatcgcagctagatttgtggctgacagcgattataaattcctgatcgacattcgcaaggtgatgatggaaaaagtaggtaaactggaattctctgatgccctgctgaaacgtatcatgttgctgaacaacgaagaaaagggagaagaatatgttgctgaaaactatgataagagcattgaagaactgacttggcacctgattaaggaacagttggttgaagcaaacgatatcaaagtagaacaggaagatgttctgaagatggctagagaaacaacaaaggcacagtttgctcaatacggtatgttgtctattcctgacgatgtgcttgacaactatgcacaggaaatgttgaagaagaaagaaactatcaataatttggtaagtcgtgtggtagaagtgaagcttgctgctgctctgaaagcacaggttactttggaaaacaagaacgtttcgatcgaagaattcaataaaatgtttgagtaatcattcggttgaataaaatataaagtcacagaaacacagagtttttataaaattataactctgtgtttttttgtgtctctgtattctttttcgtttctttgtacttacgtttatttttaatttataagaaaggaacaattaacatggatgattttagaaaatacgcaaccaagcatttaggaatgaatggcatggtattggatgatgtgattaagtcgcaggccgggtatttgaatccctatattctggaagaaagacagttgaacgtaactcaactcgacgttttctcccgtttgatgatggaccgcatcattttccttggtacacaagttgatgactatacagctaatacgctccaggcacagttgttgtatctggattctgtggatccgggtaaggatatctctatctatatcaactctccgggcggaagtgtatatgccggactgggcatttatgatacgatgcagtttatttcaagcgatgttgctaccatctgtacaggtatggcagcttcaatggcagccgtattgctggttgccggtgctgaaggcaaacgttctgcattgcctcactcacgtgtgatgattcatcaaccgatgggtggtgcgcaaggacaagcatcggacattgaaatcacagctcgtgagattcagaaattgaagaaagaactttatacgatcatcgccgatcattcgcatactgatttcgataaagtatgggcggactctgaccgcgactactggatgacagctcaggaagcgaaagagtacggtatgattgatgaggtattgattaagaaataaaaatggctgattcaaaaacaaagaaaagatgtagcttctgtggacggtcggagaatgaagtcggattcctgattacgggaatgagcggctacatttgcgacagctgtgctacccaggcttatgagattactcaggaagcattgggagaaagcaagaaaagtgcaggagctaccaagctcaacttaaaagaactgcccaaaccggtagaaatcaagaaattcctcgaccagtatgtgatcggacaggatgatgcgaaacgcttcctttccgtatcggtctataaccattataaacgtttgttgcaaaaagacagcggtgatgatgtggagattgaaaagtcgaacattattatggtgggtagtaccggaaccgggaaaacgttgctcgcacgcacgattgctaagttactgcacgtgccgtttactattgtagacgctacagtgctgacggaggccggttatgtgggcgaagatatcgaaagtattttaacccgtttgcttcaggtggcagattataatgtacctgaagctgaacagggtatcgtgtttatcgacgagatcgacaaaattgcccgtaaaggagataatccttccatcactcgcgacgtgagcggtgaaggcgtacagcagggattactgaaattgctcgaaggttctgtggtgaacgtacctccccagggaggccgtaaacatccggaccagaagatgattccggtaaataccaagaatattctctttatctgcggcggtgcgttcgacggtatcgagaagaagatcgcccaacggttgaacacccatgtcgtaggttatacggcatcgcagaaaacagcgacggtagacaagaataacatgatgcagtacatcgctccacaggatttgaagtcattcggactgattcccgaaattatcggacgtcttccggtgttgacttatttgaatccgctggaccgggatgcgcttcgtgcgatccttaccgaaccgaaaaactcaatcatcaaacagtacatcaaactgtttgaaatggatggtatcaagctgacatttgaagatgatgtcttcgaatatatcgtcgacaaggcggtagaatataagctaggtgcccgcggattgcgctctattgtggaaacaattatgatggatgtcatgtttgaaatcccttcagagaacaaaaaagagtataaggtgacgctggattatgcaaagatgcaactggaaaaagcgaatatggcacgactacaaaccgcttaaaatcaaagagtaaggctacagaaaatgatcgtaactgtattttcttgaaaatattagtcgcattttgcttggtaattacgaagttgtttataactttgtttggctctcttgaagaagagaacatacttaaagttaaaccatgaactgaataaaacaaccttagttaagatggcagggaagattaatttaacagatgaactgaaaaagtatttcggatttaataagttcaagggaaaccaggaagcgatcattaataacttgctcgatggtaaagatacctttgtactgatgcctaccggtggcgggaaatctttatgctatcagctaccttcggtcttgatggaaggtacggcaatcgtaatttctccgctcattgcgttgatgaagaatcaagtggatgcaatgcgcaatttcagtgaagaagatggcgtcgcccattttatcaattcttcattaaataaaggcgcgatagaccaagtgaggtcggacatccttgccggaaagacaaaattgctatatgtagcgccggagtcgctgacgaaagaagaaaacgtagagtttttgcgttcggtaaagatttcgttctatgcagtggatgaagctcactgtatttctgaatggggccatgactttcgaccggaataccggcggattcgccctattatcaatgaaataggtaaagctccgttgattgcgcttaccgcaacggcgacaccgaaggtgcagcatgatatccagaaaaatctgggaatggtagatgctcaagtcttcaaatcttcgttcaaccgtccgaacctttattatgaggtacgtgcgaagaccgctaatattgacagggatattatcaagtttatcaaaaacaatccggagaaatcgggcattatctattgccttagccggaaaaaagtggaggaacttgctgaaatcctgcaggcaaacggtatcaatgcgcgtccttatcatgctggaatggattcgttgaccaggaccaagaatcaggatgatttcctgatggaaaaagtggacgttattgtagcgactatcgctttcggtatgggaattgacaagccggacgtgaggttcgtgattcactacgatattccaaagagtctggaagggtattaccaggagaccgggcgcgccggtagagatggcggtgaaggtcagtgcataaccttttatacaaataaagacttgcagaaactggaaaagttcatgcaaggaaaacctgtggcagagcaggaaattggcaagcagcttctgttggaaaccgctgcttatgccgaatcttccgtatgccgacgcaagacgttgctgcattatttcggtgaagaatatacggaagaaaattgtggaaattgtgacaactgtttaaaccctaaaaaacaagtggaggctcaagagttattgtgtgccgtgattgaagcgattatcgcggtgaaagaaaattttaaggcagattatattatagacatactacaaggtaaagaaacttccgaagtacaggcgcatttgcatgaagacctcgaagtcttcggctccggtatgggtgaagaggataagacatggaacgcagtgattcgtcaggcgctgattgcaggttacttgagcaaagatgtggagcattacggactcctgaaagtgacggaggaaggacataagttcctgaagagaccgaagtcattcaagattaccgaggacaacgatttcgaagagacggaagaagaagttccggcacgcggcggtggctcctgtgcagtagacccggctctttattccatgttgaaggacttgcggaagaaactctcgaagaaactggaagtgccgccttatgtgatcttccaggacccgtctttggaagcaatggctaccatttatccggtgacattggacgagttgcagaatatacctggcgtaggtgccggaaaagcaaaacgttatggtgaagagttctgtaaattaatcaaacgccactgtgaagagaatgagatagaacgtccggaagacctgcgggtacgtacggttgccaataaatctaagatgaaggtagctattattcaggctatcgaccgtaaagtggcgttagatgatatcgctctttccaaagggattgaatttggtgaactgttggacgaggtagaagcgatcgtttattcgggaaccaaactgaatatagattacttcctggaagaaatcatggatgaagatcatatgcttgatatctacgattatttcaaggaatctaccactgataagattgatgatgcgcttgacgaattaggcgatgacttcacggaagaggaagttcgtttggtacgtattaagttcatctctgaaatggctaattaaaaaagcgaaaaaaataggcgtgcaggtatgcggttttgaataaaaaccgtatatttgcacgcaataatttttaaacgcatagccctatgtcatttattgctgataagattgtaatggatgggttgacttacgacgacgtattgttgatccccgcttattctgaagttttaccgcgcactgtcgatctctcgactaagttttcaaaaaacattgagttaaaaattccttttgtgacggctgccatggatacggttaccgaagcgaaaatggctattgccattgctcgtgaaggtggtatcggtgtgattcacaaaaatatgtctatcgaagaacaggcaagacaagttgctatcgtaaagcgtgccgaaaatggtatgatttatgaccctgtaacgatcaaaagaggttctactgttcaggatgcactggacatcatggcggaatataaaatcggtggtatccctgtggtagatgatgaaggttatttggtgggtattgttaccaacagagatttgcgtttcgaaagagacatggcaaaacatattgatcttgtcatgactccgaaagaaagattggtgactactaaccagtctactgacttggaatctgctgcacagattcttcagaaacataagattgagaaacttccgattgtcggaatggacggaaagttgatcggtcttgtcacttataaagatattacaaaagcaaaagataaaccgatggcttgcaaagatgccaaaggtcgtctgcgtgtagctgccggtgtaggtgttactgccgatacgctggatcgtatgcaggcattggtggatgccggtgcagatgcaatcgtgattgatacagctcacggacactctaagtttgtgattgaaaaactgaaagaagcaaagaaacgcttcccgaatattgatattgtggtaggtaacattgctaccggagaagctgccaaagctttggtggaagctggtgcggatgctgtgaaagtaggtatcggtccgggttctatctgtacaactcgtgtggttgccggtgtaggtgttccacagttgtcagccgtctatgatgtagcaaaagcgttgaagggtacaggtattcctttgattgccgatggtggtttgcgttattcgggcgacgtggtgaaagcattggctgccggaggatattgcgtaatgatcggatcattggttgccggaacagaagaatctccgggtgacactattatctttaatggtcgtaaattcaaatcctatcgtggtatgggttcattggaagcaatggagaacggttcgaaagaccgctacttccagagtggaactgctgatgtgaagaagcttgttcccgaaggaatcgctgcccgtgttccttataaaggtacgcttttcgaagttgtgtatcagctgactggtggtttgcgtgcaggtatgggatactgtggcgctgctaacattgagaaacttcatgacgctaagtttacccgcattaccaatgcaggtgtaatggaaagtcatccgcacgacgtgacgattaccagtgaatcgcctaactatagccgtccggaataatagatagatacggtgaactattaacggtgaacggtgaacaggctgtataatcagcagggtgttcactgctcaccgtttgttgtttgaaaaataaaagttgatgatgaaaagaagcctgttgttgggatgtatttctctctttgtagtcgcggtctttgcacaggaagatccggtattgatgcgtgttaacggaagagagatactccgttcggaatttgaatatgcataccgccgttatgcggaacgttcaaatgccagacttttgtccaaagagtatgcggcacttttcgctcaatcgaagttgaaagtggaagcagccagggctgccggacttgatacgacctctatttttcgtaaacaacaggagaaatgccggaccgagttggtggaatcttatctgatagacaggcaagtgatggatagttgtgcccgtgctatctatcagaagatggggttgaaagcacgtagcggcagggtacaggtgatgcagattttcaaacgtttgccacagacaatcacttcccggcatttagaagaagaaaaaacgcggatggattctatataccggatgatacagaatcagccggatttgaactttaaccgtttggtcgaaatatactcggatgataagcaaagtagatggatcgaatgtctggaaacaacgagcgagtttgagaatgttgctttctctctggcaaaaggtatggcatcgcagccctttttcactcctgaagggattcatatcttgaaagtgatggatcgggaggaaacagctgcttacgaaaatgtcagtgccaggttaatggaacggttacggcgcaaggagattttggacaaaggtacaggcgcggtgctcgaacgcttgaaaaaagcatggcggtatgctcccaatcaggcggcaatggaagaactgctggcgaaaggccgtacagaacaaaccctgtttacgattgacggacaagcatacaccggaactatgttcacgcattttgcctcttctcatcctcaagctgtcaaacggcagttggaaggatttatagctaagtcattgctggattatgaaagccggaatatcgaaaaaaagcatccggaaattccttatgccttgcgggaatctgatgaaaactatttggtggaagagataacacgtcagaaaatagatttgcccgcagctaatgaccgggcgggattggctacttattttaaatttcattcgtcggattatcggtgggagagcccccggtatagaggagtcgtgcttcattgcgttgataaaaagacggcaaagcaagccaaaaaaatgctgaagaaagtgccggaaaaagagtgggcggacaagcttcggcaaacttttaatacatccggggaggaaaagatacaagttgaacaaggaatttttgccgacggagacaataaatatatagataaactggtttttaagaagggtgattttgatcctttgatgtcttatccttttactattgtagtaggcgaaaaaatgaaaggtccggatgattatcgggaagtaattgatcgggttcgaaaggattatcgaagctatcttgacacgtgctggatgcgggaattgagtgagtccggtaaggttgaaataaaccaagaggttttaaaaacagttaataataactgatgtaaccgattattcactatcttcgtaccttaaataagtagattttagttgccgatgcgaatattagtcctcttactgattacccttcttggttgtggagcgtgcaaggaacagcacgaccacaaaggaaagactcctttggtagaggtggacggtaattttttatataaagaagatttgatgtccgtgcttccggtcggattgtcaaaagatgatagcattctcttcaccgagcactatattcgtagttgggcggaagagattttattgtatgagaaagctgcgaacaatatccccgataatgtggatgtagacaagctggtggagaattatcggaaagcgttgataatgcatacttatcagcaggagttgattagccagaagttgacgaatgatatttccgaacatgagatagcagagtattatggcaaaaacaaggaattgtttaaactggaaagtccgttgattaagggattgtttattaaagtgccgttgacagctccccagttgaacaatgtgcgcagatggtataagtcggaaaaacaggatgctatcgagagcctggaaaaatatagtttgcagaatgcggtgaaatatgaatatttctatgataaatgggtgtccgtgaccgatgtcctggacatgattccgttgaaagtagaggcaccggaagagtacgtaaacaaacaccgtcaggtagaattgaaagatacggcttattattatttcctgaatgtgagcgattatcgcggagttggtgaggagaaaccgtatgaatttgcccgctcggaagtgaaagacttactggtaaatcagaaacgggtgagctttatggaacaggtaaagaacgacttgtatcagcaggcggtaagtaagaagaagattatatataattattaaatacaaagaatgaagaagtttgtgaactttagatttgttgttacccttgtcctggcaatatttgctaatgtggcaacctatgcacaagataatgtggttgatgaagtagtttgggtagtaggtgacgaagctattttaaaatcagatgtagaagaggcccgtatggatgccttgtataatggacgcagattcgaaggcgatccttattgtgtaattcctgaagagattgctgtgcagaagttattcctgcatcaggcaaagttggacagtatcgaggtttccgaagcggaaatcatccagcgtgtggatatgatgaccaatatgtacatccagcagatcggttccagagagaaaatggaggagtatttcaataaaacatccacccagattcgtgaaactttgcgtgataatgcacgtgacggattgacggttcagaagatgcagcagaaactggcaggagatatcaaagtgactccggcagaagtacgccgttacttcaaagatcttccacaggatagtatcccttacattcctacacaggtggaagtgcagattattactttgcaacccaaaatacccgtttcggaaatcgaggatgtaaagaggacactgcgtgattatacggatcgtgtgacaaaaggagaaatcgacttctctacattggcccgtttgtattctgaagataaggcttctgccattaaaggtggtgaatgtggatttatgggacgtggtatgatggaccccgcttatgcgaatgtggcattcagcttgcaggacccgaagaaagtttccaaaattgtagaatcggaatttggtttccatattatccagttgattgagaagcgtggtgaccgtgttaatacccgccatatcctgttgcgtccgaaagtctcggaaaaagaactgaccgaggcttgtgcccgtctggattctattgcagatgatattcgtgctaacaaattcacatttgatgatgccgctgccgttatctcacaagataaggatacccgcaacaatcacggtatcatggtgaacatcaatgaacattcaggtatcactacttctaagttccagatgcaggatcttcctcaagacgttgctaaggtagtggataagatgaatgttggcgagatttccaaagcttttacaatgattaatgagaaagatggaaaagaagtatgcgctatcgtgaaattgaaaactaaaatcaatggtcataaagcaaccatcgcggaagactatcaggatctgaaagaaatcgtaatggataagcgtcgcgaagaggtgttgcagaaatggattctgaacaagcaaaaacacacttatgtacgcatcaacgaaaactggcagaagtgtgacttcaagtatccgggttgggtcaagaatgactgatataaccttgctttgactttatatgctgaaaaagaataagaaaaataaacaacaagacaggcatagatggctccttataggctttctatgcctgtttggtgtatgtcttgtggcacaagtgaggccgacgggacagaaacccacggcaggggcttcgacaaaatcgactgcggatacgtctaagacggctcccaaaaccaaaacgccggcgggtaataagaaacaatcggacaacaagaagcaaccggagaataaaaagaccaaagtttacttgctccatgctgacgaaggacaggcggataagctggcacgtccggatgtgcaggtgttgattggtaacgtgaagttgcgccatgacagtatgtatatgtactgtgacagtgcactgatttttgagaaaaccaactccgtagaagccttcagcaatgtgcgtatggaacagggagacaccttgttcatttatggtgattatctttattatgacggaatgacgcaaattgcgcaacttcgtgaaaatgtgaagatgattaaccggaacacgaccctgctgacggacagcttgaactacgaccgtctctacgatctcggatattatttcgaagggggaactttgatggatgaagagaatgtactgacctccgattggggcgaatatagccctgcaacaaaacagtcggtattcaaccatgatgtgaagttggtgaaccctaagtttgtgttgacctccgatacattgaggtataataccgaaaacaaaatagcagtaattctcggaccttccaatattgtcagtgataataatcatatctattcggaacggggattctataacacattgaccgaacaagcggaattgttggaccgttcggtcctgaccaatcaggggaagaaacttgtaggcgacagtctgttctatgaccggataatcggttacggagaagcattcgataatgtgaagatgacagactccatcaataagaatatgctgacgggcgattattgtttctataatgaattgacggactccgcgtttgcgacgaaacgtgcggtggcaatcgactactcgcaagggcctgacagtctttttatgcatggcgatacattgcagttggtgtcttacaacctgaataccgattccgttttccggttgatgaaggcttaccacaaggtacgtatgtatcgtacggatgttcagggagtatgtgactcactggtctataattcgaaggattcctgtatgaccatgtataccgaccctattctttggaatgaagggcagcaactacttggcgagcagatcaagatttatatgaatgacagcacgattgactgggcgcacatcatcaaccaggcgttgacggtggaaatgaaagattctattcattataaccaagtgtccggcaaagagatgaaagcctatttcatcaatggagatatgcgtcatattgaagtgattggtaatgtgttgaccgctttctatccggaagaaaaagacagtacgatgaccggatttaattgtctggaaggtagtgtgcttcatctttatatgaaggataagaagatggaaaaaggactgtttatcggtaaatccaacggaacgatgtatccgatggaccagataccgcctgataaattgcgtcttcccacctttgcctggttcgactatgtccgtccgctgaataaggatgatatctttaactggcggggtaagcgtgcgggcgatacactgaaaccgaccaccgaccggcgacccaaaacagaaaagcgaaacttaataaatatgaagtagtatgggaatgtttaactcaatgagaaagccccgtggctttaatcatcaatacatttatgtagacgagcggaaagaaaagctcgcaaagatggaggagaacgccaaacgtgacttggggatgcttccggaaaaggaatttaatccggaggatattcgcggtaagttcatcgaaggtactacgcatttgaaaagaagaaaagcgagtggccgcaaaccggtctctttcggaatcatactgataatcattgctttccttctttatctgtggcattatttggcgacaggaagctggaacttttaattattaatttacgaagaatgagcgatataattcatttgttacctgattcggtagctaaccagattgctgccggtgaagtgatacaacgtcccgcgtctgtcatcaaggagctagtggagaatgcgattgatgcagatgcacaaaatatacatgtattggtgactgatgcaggtaaaaccagcattcaggtgattgatgatggaaaaggaatgtccgaaacggatgcccgtctttcttttgagcgacatgccacttccaagatacgtcaagcggcggatctgtttgctttgcgtacaatgggatttcgcggagaggcattggcttccatcgctgctgtggcacaggtagagttaaagacacgtccggaatcggaagaattgggcacgaagctggtgattgcaggctctcaagtggaaagccaagaggctgtgtcctgttctaaaggaagtaacttctctgtaaagaatctattctttaatgtacctgcccgtcgtaaatttctaaaggctaattcaacggaattgagtaacatccttgccgaatttgaacggatcgctttggtgcatccggaggttgccttttcgctttatagtaatgattcggagttattcaatcttccggtatcacaattacgtcaacgtatccttgctattttcggtaagaagctcaatcagcagttactgaatatagaggtcaatactaccatggtgaaaatctccggatacgtagccaagccggagactgcccgtaagaaaggggcacatcagtatttctttgtcaacgggcgttatatgcgtcatccttattttcataaggcggttatggaggcttatgaacagttgattcccaccggtgaacagatttcctactttatctatttcgatgtagatccggctaatattgacgtgaatatccatccgacaaagactgaaatcaagtttgaaaatgaacaggccatctggcagatactttcggcatccgtgaaggagtcgctgggtaaattcagtgcgatcccttccatcgactttgatacggaagatatgcctgacattccggcatttgaggagaaaatatcttccgagcctccgaagatacattataatacagattataatccgtttaaagtttctgctggtggcggtggtggcggatcgtacagccgttcgaaagtggaatgggaagatttgtacggggggctgacgaaagccagtaagatgaataacccgcaaccggaacccgaaatggattgggaagactcttctattggcggcgaacccgctttcgttgaagaaaagatggagacggtcacctctgccgcttcttctactttgtatgccagtgaaccggtgatggagaaaggaaatcagcatttgcagtttaaagggcggtttattttgacttcagttaaatccgggctgatgctaatcgatcagcatcgggcacacatacgggtgctttttgatcgttatatggtacagatccaacagaaacagggggtatcacaaggcgtcctgttcccggaaatcttacagttgccggcttcggaagctgctgtactgcaaagtattatggatgatttgtctgcagtcggtttcgatttgagtaatttgggaggcggtagctatgccattaatggtattccttcggggattgaagggctgaatccggtggaactggtgcgtaatatgctgcatacggcgatggaaaaaggaagtgacgtcaaggaagaaatccaaagtattctggcattaacattggctcgcgcggcggctattgtttacggacaggtgttgagtaatgaagaaatggtaagccttgtagacaacctttttgcctgtccctcaccgaattacacccctgatgggaaaactgttttgacaacaatcaaggaggaagacatcgaaagattattcaaataaaacaaataatttcatctttttctaaaaccttttagttcagttcgtgttatttaaatagttcaacaaagaaaaagatttaaataaccacttaactattaggtatatgaaaaagattctgatgttgctggcatttgccggcgttgcgtctgtcgcttctgcgcagcagacaatgactgtaactgaatacgaagtgattcaggtacaagataaatatcaagtaataactaatcctttctggagtaactggttcttctctgtaggaggcggcgcccaggtgctatatggaaacaatgaccatatcggcaaattcagagaccgtgttgctcctacatttaacgtgtctgtcggcaaatgggtaactccgggattcgggctgcgtttgcaatacagcggattgcaggcaaaaggattcactaccagcgaaactgctaattatgtagtgggtgccccgagagaagacggttcttacaaacaaagatgggactacatgaacttgcatggtgatttgatgattaacctgaacgcacttttcggtggatacaatccgaaccgcgtatatgaaattatcccttatataggtgccggttgggctcatgcttattctcgtcctcacactaactccgctactttcaatgcaggtattatcaaccgcttccgtttgtcgaatgctgttgacttgaatctggagttgagtgcaacaggtctggaaggcaagtttgacggagaacatggaggtaaacccgattatgacggtatcttaggtgctaccctcggtgtgacttattacttccctacccgcggattccaacgtcctactccacagattatctctgaactcgaattgaatcagatgcgtaatcagatgaatgcaatggcagcagctaatatgcaattgcaacagcagttggcaaatgcacaacaaccggtagaagtagaagatactgaagaagttgttatcacagatactaacattgctccgcgtaccgtattcttcaagatcggttctgataaattatctccgcaagaagaaatgaacttgtcatatcttgccagcaagataaaagaatctccgaatgctacatacacaatcaacggatatgctgactctgcaaccggtactcctgctttcaatcagaagttaagtttggaacgtgcacaggttgttaaagacttgttggttaagaagtatggcatctctgccgatagactgaaagttgcagccggtggtggggttgacaaattcggtcaaccgattctgaaccgtgtagtattggtagaatctgcacagtaataaaaagtaaaaaagcgatttcagcattcagcgattctctgtaatcgcttgctggaaaggaaaagcggctgaaagcgaaccctgaaaagagaggttcatgctttcagccgccttttttatatctgttattttggggtatctcctctgatattttattttagtttatttgacaggctgataatctctggactttccataaaatcctggggccggcacataaaggcgattgatgcgcttgttaccagcactattcttctaatggctcaaagtgttctttttgaaactcaccattctcatttctgatataggctgtaccatatggagcgtgaagtaacggtattatgtcgggatcgtattggcagatagtatttagcttatagataccactattttgagcggtttgcatatattcgtcactctcatctccagctgtaaatcgccacccgctatcatatctttcaaacggatcgccttcttccggtttttcacgatacatatatccaacaggtaagccatccactgttattctatcagtggctatacatccatcagaagtttcccaatcgttaagaagaacctcattttctcgtccatttataaaaaatgctttttcctttctcatttttattatttctttgctgctaatggcacggaaatatgcaccgtttaggtgcttaattttcatgttagtaatatttattcatctttttgtccgttcaatcggatttgtaatccgattgttttgagcatcaggattttcaatccgaactatatattaaagtataggtgtattgcggattataaatcctgatactcggagaacggcggattgcaaatccgccgggacgcaggacgcataatgtttggtaactagctaaccttccactgttattttttctaagtatatgtccttctttagctaaatatcggcaatgagactttcaaattaggatatttgtcgcccaattgtttcaagaagtcattgccaatgataatatcctgtattgtttcttgtggatctgtcggaatctccgggatatttgtaaatatcagacaggagtagataatgagttcaacaggtttctcgtcggtttgcaatgaaagtttgtatgctttcacgttgtttcctctggcttgtgcctgtgcttgtacttgtccctccataggaattgcgatgagacgggaattttcaagacgcgcctgattgaatacaaaatgattgtcgatttctccatctgtgtctgtatcgaataggtgcagattgtctccgctcaataccagatatttgggagtttgtacggtattgaaacgtacagttcctaaagtggccattcctttcagcttatctttcattccgtctttgagtgcggatgctacaccatactcattgctggcatagttgaaagcgtcaattttttcttctcccatagcttctttcaggaaagataaatcagagtttaagcagagttttttatactgttctgcatttgcaaattcagctttgaaatcggtgttgttcactacttgtgcttgttgcgagtttttgtttttcatgtaaaaccagtatcctagatatagaacaatgaaaatgaccggaataaaggtgtaaatagacatagtttgtactttttaatgttattaataatggtttgttttatacttccacgggtttcacttctttcttttttccaggaatacatccccaaatgataagggcaattataagaagtccgacagctttaccgccataacgggaatagaaaccgaccttgttcaacttctctccatccaaattattttcttttaggatggtagccagttgttcttccgtcagttcatagtaagtgtcttccttttcgcaatagccgaccaggcgaggctctttctctatatatagagggagaaggtaagcgatgttgaactcctgatggaaagttgccagatcaatgtagtttccatcgtctgtttggtactcttcggtatcaggcaaatctgctactttggttaatacttcgcggtcgccgaaagggatttttaaaccacgtgcggatactgtttggcaagataagaaaagaatgccgccaagtgcaaatagaaatttaaggtgcttcatgcttcttgtgtttaagtgaataatttgtgtgatttttattgatattgtggcaaagataggaaaaagaagaataaaagccgtataattgtttggaatttgtaagctctattcttttttataaaatgaggagatttttttcctgatttagaggatttgtatcctgatttatgcaattgatgtaaaattgcattattgggataatccaaataatttaataacaattggttggagctattaataattatctatatttgtgatatagaactcaaatctggaatattatggacgactttaataccgtatatgcactactcgttttagttatgttatttattttattgagtaggttggacaatcgcttcggaaaaatagagaaagagttgaatgagatgaagaaatggatggaagattatctcaaggttcagcaaaattctgttgctgaagcctccaagccgaaagaggaaatatcagaaaaagaaataaaagatattcctgtgatgcctcaagtggcagagcatgttaaggcagtaaagaccggacaacgagaagaggctgttcaggaaaaacacgaaccggttgttgaagcagttgtccgtgagacattggaaaagacgcctgaaaagacgcttgaaacaagaatggaggaagtttgtgtagaggctgttcggaaggaatccgctgaatcttcgactgtgccagttgtaccggttactccggctactccggttgttccggttgcaccgactgttccgaaacaaaagaagcaggtgaactatgaaaaattcatcggtgagaaccttttcgggaagattggtatccttatatttgtaattggtgtaggtttctttgtaaagtatgccattgataaaaactggattaatgaaaccttccgtaccgtgcttggtttcttgacgggagctgtattgctggctgttgccgaacggttgcaaaagaaataccgaaccttcagttcgctgcttgcgggtggtgctttcgctgtgttctatcttacagttgccattgctttccattattatcatattttctcgcagactatggcctttatcattctgattggtgtcacagtgtttatgtctattctgtctgtggtatataatcggcgtgagttggctatcatttctcttgtaggaggattccttgcaccattcatagtgagtagcggggaaggaagttatttggtactgtttacttacgtgagcatattaaacttgggtatgttcggactttccatttataaaaagtggagtgaacttccaatgatttcatttgtcttcacttgcctgataatgggaatctttcttttgtttaactatacctccggttctacggttatttcgaaccatctgttttggtttgctactctgttctattttatctttctacttccggtgttctctatccttcgtggagagaatatgcggacgatgagccggggattagtattcgtcattataacgaataattttatctatttgctttcaggagccttattcttgcggaatatgggattatctttcaaagcaagcggcttgttgagcctgtttatcgcactcgttaatttaggattagtgctttggctctggaagaaccgcaaagagtataaatttctggttcataccacactgggacttgtattgacatttgtctctatcactattccgattcaactggacggaaactatataaccttgctttgggcatcggaaatggtattgctgttgtggctctatgttaagtcgaaaattagagtatatgagtatgcggctaaagttctggtaggactcactttcgtttcttacttgatggatgtgtatagtgtgatgtttgaacatcattccttggatacaatttttctgaatagttcatttgccacctctttgtttgtgggattagcgacaggagcatttgcttcttctctacggcacgccggttgaaatacagcttctggaatccttttatgcttatcgtctccgtaatcatactttattatacatttatgatggaattcaatttgtattttgaaggggcgacgagaagcggagttatgttcttgtttacagccatatccatttcgagtgtttgctatgctttcagaaaacgattcccgataacgaaacatctcacttcttatatcttgactatcggggcaaacgtacttgtatatattataaatatatggggcgaccagagaatatggacttcccctcctgttgtactaccatggctgacagctgtgttcgtaatagcgaatttgtattatgtagcacgtatgtactatacatcaatcggcataaaatcccgtttcaccgtatatctgaatattcttgccacgctcctttggctgacaatggtacgctctttcctttggcaagtaggagtggacgatttcagtgccgggctgtcactctcattaagcattgccgggttcgtccaaatggggttgggcatgcgcctgcatcagaaactactccgcatggtgagccttgcgactttcggattagtcctgctcaaactcgtctttgatgatttatgggctatgccgaccattggcaagattattgtatttatcattctgggattgatattgctgatactttcattcctttatcagaaactaaaggatgtgttgttcaagaatgacgaggaagaaacaaactgaatctttgaaaaatatccgataagaaaggctgcctgttctacaaaagaagggcagcctttaccttataattatgtttattcccagacgaaatcttttactcttgcgagaaacgtttcacctgctcttcgattaattccttatcatcaaaataattaatcttcatcgccttcttcacgtcagccaaagtctcggcagccgcagcccttgccacttcgcagccttgctgaagcatctcgtagatagcagggatatccttgctgaactccttgcgacgattgcgaatcggttccaaagtctcctgcatgatggaatttaggaaacgttttactttcacgtcacccaatccgccgcgttgataatgcgctttcagttctgccagattcggatagtctggcaagaagcgttcgaaatgttcggggcggcagaaagcatcgagataagtaaatacggtattaccttcaatctttcccggatcttgtacgcggagatgtcccgggtcggtatacatactcatgattttcttttggatttcttccggttcttccgaaaggtagatgcagtttccgagcgatttactcattttagctttaccgtcagttcccggaagacgcagacaagctgcattgtccggcaacaggatttccggttctactaatgtctcaccatatatatagttgaaacggcgaacgatttcgcgagcctgttcgagcatcggttcctggtcttcacccacagggacagtcgttgcgcggaatgctgtaatgtctgctgcctggctgatgggataagtgaagaaacctacgggaatacttgcttcaaagttacgcatctggatttccgatttcacagtcgggttacgttgcaggcgggatacgctgacaaggtccatataatagaaactaagttcgcatagttccggtatttgcgactggatgaaaatcgtagctttagccggatcaatgccacaagccagataatcaagagcaacttcgattacattctgacgtaccttttccggattgtctatattgtctgtcaatgcctgtgaatcggcaatgaagataaacatcttactataatcacctgcgttttgcaggtcaactctgcgtttcaatgaacctacatagtgaccgatatgaagtcttccggtaggacggtcgcccgtcaatatgattttttcttttcccatattttattaccttattatataatggcgacaaagataaggataaaaactgaaagaaacatcaaaatgcagttacttcatgatttgtgcctgcttaagataagaatgtaatcattaaaagccaatggaaaaacgactgtttcattaacacggtaaattatttcagtaaaaaagtgaacgtatctttttgtcatgtgcaaaatatgtcgttactttgcacaaattttgaagtcaacaatgaatcaacaggaaattagaagcaagtattatttacattcggatgtttttcatcccgaaacgaaagtcttcttctcttatttccaaaaacaatattttagttctttggtaatgcgttaatccttttttgagggtaacgcattttttttatgaacgaacttagaaataacaacttattataacaacaaaagaaatggaaaaggaaatcaagaaagttctcgttttgggttctggagcactcaaaatcggacaagccggagagttcgactactcaggctcacaagcactgaaagctttgaaagaagaaggtatcagctcagtattggtaaacccgaacatcgcaaccattcagacttctgaaggtattgccgataaagtgtatttccttcccgtgaatacttatttcgtagaagaaattatcaagaaagaacgtcccgatggtatccttttggcattcggcggacagactgcattgaactgtggtgctgaactttacacacaaggtgttcttgataaatacggagtaaaggtgctcggaacttcggtagaagctatcatgtatacagaagaccgtgacctgtttgtgaagaagctggacgagatagaaatgaagactccggtcagccaggcagtagaaaacatggaagatgccattgctgctgcacgcagaattggttatcctgtcatggtgcgttctgcttatgcactgggtggtcttggtagcggtatctgtgccaatgaagaagaattcctgaaattggcagagagctcatttgctttttccaaacaaattctggtagaagagtctttgaaaggctggaaagaaatcgaatttgaagtgatccgtgacgctaacgaccattgcttcacagtagccagcatggaaaacttcgatccgctgggtattcataccggcgaatcaattgtagtagctcccacctgctcgctggatgataaagaactggctctgttgaaagaactttctaccaaatgtatccgtcacctcggtatcgtgggtgaatgtaacattcagtatgctttcaactctgaaacggatgactaccgtgtgattgaagtaaatgcccgtttgagccgttcttctgcattggcttctaaggctaccggttatccgttggcattcgtagctgctaaagtggcacttggttacacactcgaccagattggtgagatgggaaccccgaactctgcatacgtagctccgcaacttgactactatatctgtaaaatccctcgttgggacttgacgaagtttgccggtgtatcccgtgaaatcggttcaagcatgaaatcagtaggtgaaatcatgtctatcggtcgctctttcgaagaaatcatccagaaaggccttcgtatgatcggtcagggaatgcacggtttcgtaggtaatgacgaactgcactttgatgatcttgataaagagctttctcgcccgactgacttgcgtgttttcgccattgcacaagcaatggaagaaggttacaccatcgaacgtatccacgacctgacaaagatcgacccatggttccttggcaaactgaaaaatatcgtagactacaaagcgaaactgtctacttataataaggtagaagatatacctgccgatgtaatgcgtgaagctaaagtgttaggtttctctgacttccagattgcccgtttcgtactgaatccaaccggaaacatggagaaagaaaacctggcagtgcgtgctcatcgtaaatcgatgggtatccttccggctgtaaaacgtatcaataccatcgcttccgaacatccggaactgactaactatctgtatatgacttatgcagtggaaggctacgatgtaaactattataagaatgaaaaatcagtagtcgtactgggttcgggtgcttaccgtatcggtagctctgtagaatttgactggtgctcggtgaatgcagttcagactgcccgcaaactgggttacaagtctatcatgattaactacaaccctgaaacggtttctactgactatgatatgtgcgaccgtctctacttcgacgaactttcgttcgaacgtgtacttgacgtaatcgatctcgaacaacctcgtggtgtgatcgtctcggtaggcggacaaatcccgaacaacctggctatgaaactttatcgtcagtcggttcctgtattgggtacttctccgatttctatcgaccgtgctgaaaaccgtaacaagttctctgctatgctcgaccaactgggtatcgaccagccggcttggatggaactgaccagtcttgaagaagtgaagggatttgtagaaaaagtaggctacccggtattggttcgtccttcttacgtcctttcaggagcggcaatgaatgtttgctatgacgatgaagaattggagaacttcctgaagatggctgccgaagtttctaaagaatatccggttgttgtttcccagttccttgaaaatacgaaagagattgaatttgatgccgttgcgcagaatggtgaagtggtagaatacgcaatctccgaacatgtagagtttgccggtgttcactccggtgatgctacgttggtattcccggcacagaagatttactttgcaacagctcgtcgcatcaagaagatcagccgtcagattgctaaagaactcaatatctccggtccgttcaatatccagttcctggctcgtaacaacgaagtgaaagtaatcgaatgtaacttgcgtgcttctcgtagcttcccgtttgtttctaaagttctgaaacgtaactttatcgaaactgctacccgcatcatgctggatgctccatactcacgcccggataagtcggcattcgatatcgactggattggtgtaaaagcttctcaattctctttctctcgtctgcacaaggctgacccggtattgggcgtagacatgtcttctacaggtgaagtgggatgtatcggtgacgatttctctgaagcattgctgaattcaatgattgctaccggattcaaaattcctgaaaaagcagtgatgttctcttccggtgcaatgaagtcgaaagtagatttgctggatgccagccgtatgctgttcgctaagggctatcagatttacgcaactgccggaacagcagctttcttgaacgctcacggtgtagaaactactccggtttactggccggatgaaaagccgggtgcagagaacaacgtcatgaagatgattgctgaccataagtttgatttgatcgttaatattccgaagaatcacagcaagcgtgagttgacgaacggttatcgtatccgtcgtggtgcaatcgatcataacattccgttgattaccaatgctcgtttggcaagcgcctttattgaagcattctgcgaattgaaactgaatgatattcagattaagagctggcaggaatataaataaaaacagctttagctgtctattagataaggagaactctctctttggcttgtccaaagagggagtttcttttttttattagtaaatatagcacatcagagtgtgttctatatagggagtgttttgtaagcgtctccgcgattctatatagtgtattaaaataaaaaggctaatgatccctttttagtcattagccttttcccatctgtcaggaagcagttccctgtatttttcaattggtgtgttcggttgccattcggctgttctgtttatcacatccgtgagatactcaaataaattcactttatgcatcctacaagtgagtgctatcgtatagagtatagcgcctcgttcggcccccttatgactgccgaagaacaatgagttttttctagataaggatatgtaccggttcatccgttcaaccatattgttgtccagataagtgtcaccataattaaagatgtccaccactgcattccactcattgcgaagataggtaatggcttcctgcagttcgctcttaggtaataaatccccccgttcttctatttcatcaagcacatcttttatttctccgagtatgtccggcgcatacttttttcgatgcataagattctgttctaccgtccatccctcagccccaactttatgcttatgctcgttttgataaagtgcgtttatcagctccacgatcctttttgcatccgggtccttctcaccgcaatctataaatttccgttttatatgttgcaagcacgggatgcgtgtgatattgggataagcatcgctttcgagcttccggtaaggtgagtaaccatcgctttgtatgatacctttgcaactgcctaattcgttaagaataactctttcagaccgggagccgtcatcatagagcaagtatatcatcctggtgtttatgccgacaaccacccaaaggtatcccttcctgactccttttcccttgctgttcttttccgggacgagtattttgtaataggtttcatcggctgccttataaggatcactcaaagctgtctgccggatgcacttataaagattttcgaagaggtttgaggctttctctatcaacttatgagccgtaggtttcttcagcgtaaagccatgactctcgaagtagttgatgattctttcaacaggtagcgattgtatataacgtaattccatcaatccggcaataaatgaaccgtcatagctggaattcaagaaggccgaagccggtgtttttccctcaaacaggcgaccttcttgcgtataggtgtgtatcttgtagacatgcttgatgaagcgcatgggtacacattcatagcggacgcatattctgggaacagtggtaaacaaccgggccttattgatgtcaaaatcgggatcatcgggataaacgacatgttcttcttcctccatctcataatgcatgtcacgtttggccccattattctttcttgctttacgcttatctgctttttccgcttctatcttctgccgctcttcttcggatatggcagattggggagcctgttgctgttcggatgtgttggatacaagtttggcgagtcccttagtaaggcgctgttgcttgctaagagattcgcctttttgaaggagtgcctctttaagggaagaaacctcctttatcaaagcatctatttggtccaagagtctgttgttgtcatctcgtaatcccttgatttgttccttcaataactctatgatctcatcctttttcatggcataaagatataaaaaatcaacgaattggccaaataaaccggatgatatctttagcacaaataactaataatcagaatgttgaattagatcctgaaacgctttctcaaccgtacagactttaatgacactccatttaagataaaagacaaaacctgataagaaatctcgtaattgcctgtattggggttaaatgtcggtaactcaaaacttccaccttcgaggcgcttgtagtacagaagaaagccatcgccatcccaacgcagtatttttacactttgtcggtttttaccaaagaataaaaagatatctccggaaacgggagacaagtccttcatttccgatcgtataattttgaataaaccgtcaatgccaaggttcatacgaacaaagccctggtacagatagtagcgattggctgatgttagagaatacatggatctccctcctttctttcgtaatcgcgcaacattttaataacaccaccgggtgtggcccgtttgaccgaaatggtggttccactgttaaaggtgattgtgatcccggcaagactaaactcttcttccgacaacatggcgggtgctatttgagtgaatgaaggagaggaagttgtcggttgggagggttcaacgccgccataataatcacggaccacatctgccttggcttgtttaacgctatagccccgtctggacatccaggaactcataccaccaaaagtggtatgctgatcgcggcaaacatcggctaaagaacaattgtagtctactttcaatgcttcaaggaaatgtttccaagtttttccaaatcgattttctgctaaatccataatgcttcatttttatacatagcaaaaatataagaatgaaaaaagggcgacaagatagaatcgcggagacgcttacgagtgtttttgttattaataaatgattaaagttaattattggttgaaactaagtagaatctgtctatccatcagcaagagaagtgatttattttttatttttgtttcttgaaaagataaaatcagataaaacaatgttagtacttctatcttgtgccaagactatgagtgagacttcaaaggtgaaagtacctttgaagacagttccacaatttcaaaaagaagcttccgggattgctttgcagatgtcacagttttcggtggatgaactggaacgcctgttgcgtataaatgccaggatggcggtggagaattataagcgttatcaggcttttcatgcagaagacacatcggaactgcctgctttgctggcttataccggaattgtattcaagcgactgaatgcaaaagatttctcgaaagaagaatttgaatatgcgcaggaacatctgcggttgacttctttttgttatgggttgttgaggcctttagatgtcattcgttcctaccgcttggaaggagacgtagtgttgccggaaccgggtaatcagaccatgttctcttattggaaatcccgtctgacggatgttttcatcgaagatataaagaaagcgggaggcatactctgcaatctggccagcgacgagatgaaaagtttgttcgattggaaacgtgtggagagagaagtgcgtgtcgttactcccgaatttcaggtgtggaagaacgggaaattagtttcgatagtgatctatatcaagatgtcccgtggtgaaatgacgcggttcattctgaagaacagaatcgaaaatccggaggatttgaaaagcttctcctgggaaggattcgaatttaacgaatctctttcggatgaaaagaagtttgtatttactaacggtaaagaaatataaagtatgacggaagtagaaaagatgcgtagtagccagttggctgatatggctgcgccggaattgcaggtgcgttttgagcatgccaagaagctgctggcgcgtatgcggggaatgagtacttatgatgcggggtatcgggaattattggaagaactggtaccggagattcctgaaacttcaataatctgcccgcctttccattgcgatcatggagacggaatcaaattgggtgaacatgtatttgtgaatgccaattgcactttcctggatggaggatatatcacgataggcgcccatacgctggttggaccttgtgtacagatttatacgccgcatcatccgatggattatctggaaagaagaggctctaaggaatatgcttatccggtgacgattggcgaagactgctggattggtggcggtgctattatctgtcccggcgtgacgattggcaatcgctgtgtgataggggcggggagcgttgtgacgaaagatattcccgacgacagtgtggcagtcgggaatccggcacgtgttgttcgcaaacagcttgtttaacgtttgaccggaaaagttatttcccggatttaagcgttcctgcgttactatctttgttgggaattcgttttcctgcagattctattttaattattaatgatagaaaaagaggcgcgactatctttattttgttctgtttattagatgaaccggaagaagtgaaagtggcaagaaaaaagtttttattattatttgctgataatcagagtgtttctttatttgataaaaactttcttgaaaaataatacatgaaatgtttgcagaattcaaaaaatgccgtacctttgcatcgcttttgaaacggaagtgtacgggcgtttagctcagctggttcagagcatctgccttacaagcagagggtcggcggttcgaatccgtcaacgcccacacaaaaaacgaaacacttccggctcattaacaagggcgtttagctcagctggttcagagcatctgccttacaagcagagggtcggcggttcgaatccgtcaacgcccactacaaaacagagtcttacgaagaaattcgtgagactttttttatttcttacctcttttatacaaactttctttctccttttatcttataactcaggaaaaagagttaattttgcagtctgataattatctaagaaaacgtatggaacttgatgtattaacggccatatccccgattgatggtcgatatagaggcaaaactaaagctttggcagcttatttctctgaatttgcactgattaaataccgtgtacaggtagaggtggagtattttatcaccttgtgcgaacttcctttgccgcaattgaaaggaatcgatagtagcgtgtttgaaactttacggaatatctaccgtaacttctccgaagcagacgcacaacgcattaaagatatcgaaagtgtaactaaccacgatgtgaaagccgtagaatacttcctgaaagaagagtttgacaaaatgggcggaatggatgactataaagagtttatccacttcggactgacttctcaggatattaacaatacgtctgttcctctttctatcaaagaggcattggagcaggtttattacccgttgattgaagagctgattgcacagttgaaaacctatgcgacagaatgggctaacattccgatgcttgccaaaactcacggtcagccggcttctcctacccgtctgggtaaagaagtgatggtatttgtttaccgtctcgaacgtcagttggctatgttgaaagcatgttcgcttactgctaagtttggcggtgctaccggaaactacaatgcgcatcacgtggcttatcctcaatatgactggaaacaattcggcaatcggtttgttgcagaaaaactgggactggaacgcgaagaatatacaacgcagatttcgaactatgataacctctctgctgtttttgatgctatgaagcgtatcaataccattatggtggatatgaatcgtgacttctggcagtacatctctatggagtacttcaagcagaagatcaaagccggagaagtgggctcgagcgctatgccgcataaagtgaatccgattgactttgaaaatgcagaaggtaacctgggcatagcaacgtctattctggaacatttggctgtgaagcttcctgtttcccgtttgcagcgcgacttgacagactcgacagtgctgcgtaatgtaggtgtgcctttcggtcatatcgtgattgctattcagagttctttgaagggattgcgtaaactgttgctgaacgaaccagctatctatcgtgacttggataactgttggagcgtagtggcagaagctattcaaactattctgcgccgtgaggcttatccgcatccgtatgaagctttgaaagctttaacccggaccaatcaggctattacagaaagttctattaaagagtttatcgaagaattgaatgtaagcgaagatattaaaaaagagttaagagcaatcactccccatacatatacggggctttaattgtttacttatataataaacgtgtttttaaataggccgtgaggccaaagtctaattttattcgaataaaaaaatgagcacagaaaacgaagaatggcgcgaaaattctttcaatgaagagaatacaggtgccggccgtgatggtaacaggtcttacaacagagaaggtggagaacgtccgtatcgtccttcttacaaccgtgaaggcggggatcgcccgtatcgcccgcgatttaatgccaacaatgaaggaggcgaacgcccgcagcgttcgtacggtgaccgctcttatggcgaccgtccccaacgtccttcttacaatcgtgaaggtggagatcgtccgtatcgtcctcgcttcaataacaataatgaaggaggtgaacgtcctcaacgtccttacaaccgcgaaggtggttcttatgatcgtcctcaacgtccttcttacaatcgtgaaggtggttcttatgaccgtcctcaacgtccccgtttcaatagcggcgaaggtggtgagcgtccgtcttatggcgatcgtcctcaacgtccttcttacaaccgtgaaggtggcgaccgtccttaccgtccccgctttaataacggcgaaggtggcgaccgtcctcaacgtccttcttacaaccgtgaaggtggtgatcgtccgtatcgtccccgtttcaataacggcgaaggtggcggctatcgcagcaacaacggcggtggaggttatcgtccgagatataataacgatcgtcaaggaggatatcgtcctcgtccgcgtaccggcgattatgatccgaacgctaagtatagcgtaaagaaacagatcgagtacaaggaacagttcgttgatccgaatgaaccgattcgtctgaataagttcttggctaacgcaggtgtttgctcccgtcgtgaggctgatgaatttatcacagcaggtgtggtttctgtaaacggtgaagtggtaacggaattgggtacgaagatcaaacgttcggatgtggttaagttccacgacgaaccggtaagcatcgaacgcaaggtatacgtattgctgaataaaccgaaagataccgttactacatcggacgatccgcaggaacgccgtacagtaatggatttagtgaaaggtgcttgcaacgaacgtatctatcccgtaggacgtctggaccgtaacacgactggtgtactgttactgacgaatgacggtgatctggcttccaagctgacacacccgaaattcctgaagaagaaaatttatcatgttcatctggacaagaacctgactaaagcagatatggagcagattgcagctggtatccagttggaagatggcgaaatccatgcagatgcgatcagctatacagatgatttcaagaaagaccaggtaggtatcgaaattcactccggtaagaaccgtatcgttcgccgtattttcgaatcactgggttataaagtagtaaaactcgaccgtgtgttcttcgccggactgaccaaaaaaggtctgcgtcgcggagactggcgttatctgtcggaagcagaagtaaactacctccgcatgggttcgtttgagtaataagtcaataaataacaacttgacagaggacggggaaagaaagcaggaaagaattcatcctgcatttgaaacctcgtcttcttgtatctaaaaagaaaaagttaaatggaaaagattggtagaacaaaaattgttgacctgttgaagcgcacagatattggcgctatggtcaatgtgaaaggatgggttcgcacccgtagaggtagcaaacaagtaaactttatcgcactgaatgacggttctacaataaataatttgcagatcgtagtagatttggctaatttcgatgaagagatgctgaaactgattactaccggcgcttgtatcagcgtgaacggagaaatggtagaatcagtgggttccggacagaaagtggaagtacaggctcgtgaaatcgaagtgctgggtacttgcgataatacatatccattacagaagaaaggccactctatggaattcttgcgcgagattgctcacttgcgtccgcgtaccaatacattcggtgcagtgttccgcatccgtcacaacatggcgattgctattcacaagttcttccatgaaaagggcttcttctatttccatacgccgatcattacggcttccgattgtgaaggtgccggacagatgttccaggtgactaccatgaacctgtatgacttgaagaaagacgagagaggttctatctcttatgaagatgatttcttcggtaagcaggcaagtctgactgtttccggtcagctggaaggtgagttggcggctactgctttgggagctatctacacattcggtcctacgttccgtgccgaaaactccaacactccccgccacttggcagagttctggatgattgagccggaagtggctttcaacgacattacagacaacatggacttggcagaagagttcatcaaatattgtgtgaaatgggcgttggataactgtgcggatgatgtgaagttcctgaacgatatgttcgacaaaggcttgattgaacgtctgcaaggtgtattgaaagatgattttgtacgtttaccttatacagacggcatcaagattcttgaagaagcagttgcgaaaggacataagttcgaattcccggtttactggggcgtggacctggcttccgaacacgaacgtttcttagtggaagaacacttcaaacgtccggtgattctgactgactatccgaaggaaatcaaagccttctatatgaagcagaacgaagacggtaagactgtacgtgccatggacgttcttttcccgaaaattggtgaaattatcggtggttccgaacgtgaagccgactataacaagctgatgacccgtattgaagaaatgcatatcccgatgaaggatatgtggtggtatctggatacccgtaagttcggtacttgtcctcactccggtttcggattagggttcgaacgtctgttattgtttgtaacaggtatggcgaatatccgtgacgtgataccgttcccgcgtacaccaagaaatgctgatttctaatatttcggtatatttatgtaaaactcgcataatcttcaggttatgcgagtttttttatgctctgaattgctgtattctcaaaataaatctttatatttggaaatacgcattcgagagtgttaactaaaataatacaacaatgaaaaagctctatttctttaccatgctttcaataatgttgttagcggtaacaggtgcgacggcccagaagaaaaccaaattcaaagcggccgatttgaaaggtatttggcagctctgccattatgtctccgaatctcccgatgttccgggagcgttgaaacccagtaatacatttaaagtattgagtgatgacggacaaatcgttaactttaccattattcccggtgcggatgcgattattactggatatggtacttataaacaactcacggacgattcttataaggaaagtatcgagaagaacattcatctcccgatgctggacaatcaggacaatattttggaatttgagattaaagacaatgattatctccatctgaaatattttatcaagaatgatttgaatggaaatgagttgaacacttggtattatgaaacttggaagagggtggaaatgccggctaagtttccggaagatattgtgagataaaagagcgtgtactttttagtggaggcacggattttgcaaaaggctgcatagttgtttggttatgcctgacaacagcttatttggtaaaatccgtgcctgtttttctataaaagataaaaacaaagcacttttggacaaaatcaaagtccgtagaaatagaaacgaaaatgaaaaaatagatttgcaaagggtctgtccgcgacttgctctaactttgttgccagtaatagaatacagtaacaaaataaagtggaacaatgaaaaacaaacttttactggcggtagggagtatggcgctcctgactgcttgcgatgcttcaaaaggaaatgagatggaatggttcgaccatgcagtgaaaacagcgggacatcagttgctctatatggcagaacaattgaagaatgaaccggataccgcctgttttccccgttctatcaaagaaggaaagtacagactggagcaccccacagattggacgagtggtttctatcccggttccatgtggctggcatacgagttgaccggtgatgaggctctcgcaaaagaggcgcgtaaatatacgaaccgtctgcaggatatgcaatattatacaggtaatcacgatttgggttttatgatgttttgcagttatgggcagggcatccgtttgaaaccggagccaacggacagtttgattctgattcattcttcagaaagcttgtgctcccgttttcgtccggaagtcggactgattcgttcgtgggatttcggtgattggagttatccggtgattattgataatatgatgaaccttgaaatgttgttctgggcttcggaacaaaccaataatccgaaatatcgtgaaatagccatctctcatgctgacaaaacgttgaagaatcacttccgggaggacatgacttcctatcatgtggtaagttatctggcggatagcggtgaagtagagtcgaaaggaacctttcagggatatgccgattcttccgcttgggcgcgtggacaggcttggggagtgtatggatataccatgtgttatcgcttcaccaagcagcagaactatctggatgccgctcataaaatagcgcggttcattatcgatcatcgcccgtccgaaaatgactatgtaccttattgggattatgatgctcctaatattccaaatgaaccgcgggatgcttctgcggctgccgtaacagcttctgcattactggagttgagtggttatggcgacaagaaacaaggggaagaatatttccgttatgcggagcatatcctgaaacagttatcctctgatgattatttggcccaagaaggagaaaattatggtttcgtcctgttacattcggttggtagtttcccgcacgacagtgaaattgatactccgctcaattatgccgattattattatctggaagccttgaaacgttataaagatctgaaagaaaaatcagaaaatccgtcttactaacttgaagagaaaccgtaaaaaaattaaagttcagggcaaccgcgtctaaaatatgaattcataactgtcggactttggcgcggttgtcctgttttgagccgataccggtcctttatatgagttaaaaaacgggattcatttatcagattgaattgaaaatacttatctttacgataaattcttcaatattagctcatgaaagaccggcatttgctatttaagtacctattcggattaaccgtttgcatcttattttttcctttggctgtatcggccgccgacagcttcattcattttaagcgattatccgtggatgacgggctgtcgcaaaatactgtgctcgctctgacacaagatcataataataagctttgggtaggcaccatagacggactgaactggtatgaaggttcccgtttcgtttcgtattataaagcgccggatgatacgaccagtctggcaaacaatcatgtctattcacttcataccgattcgaaaggtacggtatgggtaggtacacaggtcggtttatcccgttataatatagtagggaataatttcaccaattattcgtcaccggacaatcagccgatgcaagtattggctatcggagaaccggaggaaggcgaccggcttttgcttgctaccaatatcggtctggtggtttttgataaaaagaccgggcggatgaaagtgcagccggaacttgccggaaaaacgatctattcagtttgccggatgaatgacggtttcctgttgggaacttcggaaggtgtctatttctattatgtacgcaacgaaaacgtgacccggcttcttctccaattgaaaggagaaaccatctccgatatgctctatgatgacaaaaccggcaactgttggctggcttcattgacaaacggcgtgtattgtgtagataacaactttcaaataaaacatcattataacaagcaaaatactcctgcttatttccttacgaactcggtcaggacattgtccggagatgataaaggaagggtttggataggaaccatggaaggtttgcttatctttgaaccggagacgggaactttccgtatctgccgtttttctcctgaagatccgactaccttggggcataattccatccgctctatattgaaagacaatcaagggggaatgtggatcggtacattttatggcgggcttaattattatcatccccttgctccggcattcggacgcttgcaacattccgcctggcggaattcgttaagtgataacacggtgagctgtattgccgaagacccggataatggcaatctctggatcggcacgaacgacggcggattaaattattataaccggaaaaccggagtcttttcatattaccggacgggtacttccgccaacgctttaaagtcggacaatataaaatgtatatggacggacaaggatggaagtgtctatatcggcactcatggagggggaatgagtcgtctgcatcaccggagtggcaggatagaaacatattcctttccccattctacttccctgactaacagttgttactccttattggacggaacggatggaacgctttgggtaggcggcatgagcggactttaccttttcgacaaacagaccggcgaactttcgcagcatccgttggctaaaaagcataaaaagttggagaatgtattgatatatacgttgttccgtgattccaaaggaagaatctggatcggtacggaagagagcctgtttttgtatgccggcgggaaactggaagaactgcatctttcctcttcggcttatctgcatgggttgatacaggctttctgtgtacaggaggatggccgtcatgaaatctggattggttcttccacaggattatattgctataaggaaggagcaccgactgcctggaaacactatacgatgaaagacggtttgccaaacgactttatttataatatactggaagatgaacgggggcgtttatggttgacaactaacaagggactggcttgcttcaatacggaggagggtactttcctcaactattcaaagcaggacggattgcctcacgatcagtttaactatttcggagcttgcaaagcgcacgatggtacattcttcctggggtctcttgggggcgttgcctatttcaagccatacgaattgggtgataatccatattccccggatgcggtggtaacaggagccgttgtcttaaatcaggtgattacggatatgaaaagtgaacgggtgcgttattatcaggacgagcaagggcggatgctgggtatgtcgttcccttccgatcagaaactttttaatatccggtttgccgttatcaactatttagctggcaagcggaatcagttcgtttacaaattggaaggctttgaaacagagtggaactactcccgtcatgtttcctttgcacgggcgagttattctaatcttccgcccggtgagtatgtgtttaaggtgaaggcatgtaacaacaatggaaagtggagcgaggcgaccactgaattttttgtgcatatcattccgatgtggtatcagacttggtgggcaaagacacttttcatcttcttttctttagggcttctcgtctttgtgatctatttctttattgcccgtgccaaaatgaagatgcaagtccggatcgaacagatagaacgaaacaagatagaagaaatcagtcaggagaaagtacgtttttacatgaatatgtctcatgagttgcgtactccgttgagtctgatactggctccgttggaggaactcttggggcagagcaatctgaaaggtactccggtacaacagaaactggattacgtttataagaacggtcgtaagttgttgcacattgtcaaccagttgctggatttccgtaaagccgaagcgggtgcaatgcccatccatgttgcgcaggtgaatgtagaaggattgttgcaagatgcttttgccctgtttaaagaaaatgcgcagaagcgtgctatcagctttcatataaaatccgatctggaaggacgattgcttccggcggaccggacgtatgtagagaccatcttgatgaacctgctgtctaacgcctttaagtttacaccggacggtggaagtatttcgctttctttatgggcagagggagatacctatggtttcacggtaagagatagcggaatcggtatgtctccggaacagctaacccgcattttcgaacgtttctatcaggtagacggtcagcgaaaagggacgggtatcgggctgtcattggtgaagatgcttgtagaaaagcatcacggcactatcaccgtagcaagcgaacctgctcaatataccgaatttaaagtcacgctacctgctgatatggctgccttcacggagaaagaacgtgaattgccggcacatgaagtcgaaacatctgcttctctccgggagcttccggtggctgatgaatatttctctggtgatgcgttggctatagttgcagaagaactatcggatggtgatcagatagaagccggcagtgaggaagagcgtcctactatcttgttggtagatgacaataaagagatggtggattacctgaaagataatttccggcagaactatgtgacgctgaccgccggaaacggtgaagaagcattggctattatgaaagagcaccgtgtggacattgtcctttccgacgtgatgatgccgggtattgacggtatcaaactttgccagcttattaaacgaaatctgcaaacctgccacattcccgtccttctgttgtctgccaaaggaagtgtcgatgcacagacggaaggcattcaggctggagcggatgattacattgccaaaccgttctcgattcatttattgaaaggaaaaattgctaatcaactgaaagcacgccagcggttgaaacactattattcgaatacgattgatatagatactgctaaaatgacttcgaataatctggatgaggaattcatgagcaaagctattcaggtggtagaagaaaatatcagtaatgaagacttcacctctgatgagttggcaagccagctttgcatgagccgttcgtcactgtatctcaagatgaattccatatccggtgaaccgcctgccaactttatccggcgcatccgttttaataaagcgtgtaaattgttgcttgaagggcgctactccatttcggagattagcggaatggtaggcttcggatcttcttcttacttctctaccagtttcaagaagtatgtcggttgtctgccatcggagtatgtgaagcagcatactaagtaattgctttgcggttatgcatttgttcaccacagaggacgcggaggacacagaggtgaatcttgttcaagcaggtgcagaaatgaatgagagttttttgtctactataaagttgaaaaacataaaaacatctgccacctgcaacgaaacgcgtgtaatgcattaattgacaaatagttggagcgttgcagatactgtggcagataggttgcagataaagtatctgcaacgcgttatataatcaaagaaaaagccttgattcctttgtgcaaagctatgggataattgggatgactctatggagaatttgtggtgtctctacggggaaacgacagtatccttacgtagaaactctcgtgtcccgccttagaaactctcgtgtcctgccgtggaaactgtaatttctaatgccggaaacgacagttccccgcctggaaacgggaagttaatgcatacaataaacttttgccctcctggagaattggcttatgcaaggtttatactgtgttgcagatactttgatctgcaacctatctgcaacagtatctgcaacgctccaactatttatcaactagtgcattacacgcgtttggttgcaggtggcagatgtttttatattttttcaactttatagtaggaggattacgcatcaaaattagggtcaccaccgtaagttataaaccaaattcacctctgtgtcctccacgtcctctgtggtgaaaacctaaacaagaactaataaccttcatctttctatcaattccagtcattccgttttgggggctattttacccttttaccctctttgtagcctcctgtaacgcttgttttggacgaattttaagttgaaatgaacgaaaacaaagtcctgttagacagtatcagagaaggaagaaatgaattgaaagttccgtttcggacggtttatctacatttgcctacagaaaaaccaatcatttgatatcatgaaaaaagtattattgatttcattcgtaatcttgtctgtgactgcacagatgacacatgcgcaaaaacaagcagtcattaagctgacggagaagacattgatgcacgaaatgcgtgccactccttatcctcttgataaagcggtggtaaatgaccgtgcggtttcttttcaatggccgctccgttcggacatgaactcgcaggacagtccgttggatggattcgaacacaaagtaaagaaggtagataaaacaaagattacctatcggttacgttattcgcaggatgccggattgaagtcgggagttgttcaagtggaaactcgctggccgttctataatccggaacaaccgcttgcgccgggtgtatggtactggcagttcggttatgtagaagacggacaagtgacttggggaagcacacagcaagtcaccgtagaagatcgtccgggcaaattctgtcctccttcattgaaaacagtgttggcaaaactacctgccgatcatccgcgtgtgtggatcatgaagaacgaatggaagaactttataaatcacagcaaacaaaaggcagaaagacaatggtatcttgagcgtgcagatcaggtacttcagactccaatgaaatcagtgaaagatattaatgtctcgcaggtgaagaatctgaagaacgagatgcagataaattcatacctcactcgtgaaagccgtcgcatcatcgatgcggaagagggcaacaccgaagcattgatacgggcctggttgctgacgcaggatactaaatatgctgacgaagccatcaaacgggtatttatcatggccgactgggataaagataagaatgtgaaaggagattttaatgcttctagcttattgtctctctgctctatggcttatgattctttctacgaccggttgaatacatcacaaaagaaagcattgctggaagccatcaaaaataaaggtggtgaaatgtatgagaattttaataaccggatggaaaatcacatcgccgacaatcatgtgtggcagatgacacttcgcatccttacaatggcatcattcagtgtatatggcgatctgcccgaagccaacacatgggtggattactgctataacgtctggttggcacgtttccccggattgaacaaagacggtggctggcacaatggcgattcttactttacggtcaacacccgtacattagtagaagtaccttactattatagcaaactgaccggttacgacttcttttccgatccttggtatcagggaaatatcatgtataccatcttccagcaacctcctttttccaaatccgcaggaaacggaagttctcatcagaatgtgggacgtccaaacagtatccgtataggatatttggatgcgctggcacgccttaccggaaacacttatgccgctgatttcgtacgccgcacattgaaagtggaaccggattatatgaagaaagccttattgaataagcccggtgatcttgcctggttccgcctgcaatgtgataaacctctgccggaaggtgaaggattgactgcactccctgcaggatacgtcttccccgcaacaggacttgcctctttccagacgaactgggatagagtaggcggaaatgcgatgtggagtttccggtcaagcccttatggttctacctctcatgcacttgccaatcagaatgctttcaatacgttctatggtggaaaaccattattttacagtagcggacaccacattgagtttaccgacgtacatagtatgttgtgccatcgtgccacacgtgctcacaatacgattctggtgaacggtatgggacaacgtatcggtacggaaggatatggatggattccccgttattatgccagcgagaagatcggttatgtgctaggcgatgcttccaatgcttacggaaaagtgatttcaccgctttggctgacacgcggcgaacagtcggaggtgcattatacgcccgaaaatggctgggatgagaaccatgtgaaaactttccgccgtcacattgtcaatttgggaaagacaggactcatctttatctatgacgaactagtggcagacgaacctgtaaactggagttatttgctgcataccacagaaaatcccatgacagtggataaatcgaatcatcgcttcgtgcatattcaagccacgaaccgcggaggagcatcagacgcttatcttttctccaccggaacattgcagacagatacgacgagccgttttttctatccggcagtcaactggctacgtgctgatgacaaaggggtgttcaagaagtatcctaatcactggcatttcaccgctacatcggaaaaggcacaagtatatcgttttgccactgtcatcaatacacatgcactgaaatatcctgccaaagatcccgaaatcttgtccgacggacgtatcaaagtaggcggatggctgattagtgtaaacctgaaatccgacggtgctccttcattctttatccgcagcactcaagagaaggtgaatatcacttataaaggtgaagctactgtcatcaatgaggatgggtacgaaacggtaatgagggatacagtgcccgaactggaaatctaatcaatgaacatgaaagatacgaatatatgagacgctctacttttaatatgagaactatatgtctgttggctgcattatcgggcataaccgtcttgtcggcacagactcccggtaaaccccgtgtacagacttcggcagctccggaggaaactacggtttacaagcccggcgggaaaaagcaggaaacagcagttgcgacttcttcaaaaaaggaggaggataaacgccaatccggcaaagagaatacaggaaagaaagcggctgcctttgatggtcaacgctatctggcactgaaaacgaatgtaatatatgatgcttgtgctttgctgaaccttgccgtggaaatgcaggtgcataaaaagatcacggtagagttgccattgacttgcagtttgtgggacttgggagataagcacggcgtgtgtacggtagcattgcaacctgaagcccgctggtggataggaaatgagacaggacggggacactttgtcggactgcacgcccacgtggcatggtttaacgtaaagtggaacgatgaccgttatcaagatactgatcgtccgttgttgggagccggaataagctatggttacaaactccctctttccaaacactggggagcggaatttaatctgggagtgggatatgccaacatgaagtataacacctattataatgtagacaacggcgcactgctggatacgcgtgtccgtcattactgggggataacccgtgtgggagcatcgttggtctaccgcttctaaccttagataggaacatacatataaataagataacaatatgagaagaaatttatatatactggcgcagtgcactttcctgttgttcatcaccttgctggtgaatggatgcagcctgcacgaagaaccggaaatgactcccgaaggagaactgggagtggacccgacagctgtaacactcaaccttaatctggcaatgaatctaagtttggcagaaagagcaccggtgactatcacccgtgcgtcggaaaccaactatctgcgtcgtttcatcgtagaagcctatctggatagacaggtggcggcacggcaaacggtatacgaagaggattttaaccgtgccagtctgtctgttagtatgaagctgcacgcccgtaattaccgcatcctggtgtgggccgattatgtgaatgcggagacaccggaacagggacttgtttacgatgccaagaatctggcttttatccttcctgccggaaagtatatagggaatagccgttataaagatgtttttgctgcttctgctatggcagacctgacttctttccgcaatcattggggagctgaaacaagtcttgacgttgaactgtatcgccccgtagcacgctatgaactggtggctaaagatgtggcaacgtttctcaataaactgtccacaggcggactgaaaggtgaaagttttaccgctcgtgtgaagtacagtgattatttgcctaccggctacaatttgtgggacgatgtacccaagaactcgctcatgtacatggaatataaagtggcctttgaacgccctgccgatggtacgaaagaactgatactgggattcgactatgtgttgaccgatgccggagaaaccgtttccatccctgtagagctcgaaatcttgaatgagaagaatgaagtgctggcacgtacagctttccgtattccttgtgaacggggcaaaaacacaacggtacgcggtaacttcctgacttccgatgccaatggaggaatagggatcgaccccgattatgacggtgatctggaagtagaccttggagaattataaaatagacaaatcaattaagaattgcttaaccataaaacaattaagatcatgaaaaagaacttattttattcgctaatggctttgttcgtagtgctttttgcatcctgtggacaagaagaaatcgtttcggccaacggaacagaaatcaatgctcctgttaccatctctgtacaggctcctgtaaataacgtctttagccgtgcggttaccatccctgacggttatacgatgcaatgtatcatgcaattactgaatgctgatggcaataagataggcgatcaggtaactaaaccggttacagacggtaaggtatctttcactatttccgtagatgaacaaaaagatgtgtcgaaagcattgttctgggctgaatacgtaccggaaagtggtgctgctaataaagtatataacactgctgatttgagagcagtaggatataatactgcatcatttgatctgacaaatgatgcgttgatggcagccagcgacgctttctgcggaaaattggaaacgattggtaatgccagtgtgacattgaagcggccgtttgccaatgtgagcgtaaaaccgaagaatccggaagtagctgcgcaagctgataagctggaaataacatacaacgctttgagcggatatgatattttagagggtaaatgttctgctacgactcctgtgacttatacaaatgcaaattttgcttctgcggatggcaattggttcgctaatttcttttttgctccttcaaatgtaggtaaatttacagaagaaataaccatggcattgagtggcggatatagtaaagagattaaaataccggcaaatacattacctttggatgctaatatgcagattatggctaaatttgaaatcggcgatggaaactttgacattgaagtaggagtggatccagattatgaagcgttggaaatgaaggttggtagttatatcaatgcagaaggtaaagtggtacgtgatgcagcggatgctgtcggtattgttttcaagatggaggctatcggtagtgatgtgccggctaattatcctgtagcacttcagggcaagacaattgtcggatatgcggtagcgattgagaatgtagcggctggtcgtcaatctcttaatcctgacggcgtgttgacaaatttggttgagacagcagcaagtatgactaatggaacacagattacggaggcgttgttaacaagtattggagacgtggcgtttaaaacaacttatgaaaaatgggtgggagaacattctcttagcagtgagaatttgagtgcatggtatattcctacattgtcgcaattgagtgcgttcatgggtacattgtttactatgaaaggagtatctgctactggtagtgaagatttcagaaaccttccggaatttgaatttgccaatggtaaaatgtttgatagggagacgattgctacggtgaattatgcttccagtactatcaataaccaaagtaatgtttcaggggtacgtattaatgtaaacaatggtgtaattgatgcacaagaggcaggtattgatgtgaaaggaaaggctaatcaacaagctctttgccgcccgatgattacgatttttaaatagtcactattcgaccttactcaatagaaattcaaggaaagtgggatcccccatcccgctttaccttcttcttacattgaaacttttgaaaatagccctctaatcttatacctagaaaagaaaataatatgcacaccacatttcgcctatcggtttttcttttgttcatggtacagttattctgtagctgtacatctgactcgctgcccgaaccggacagtacgcagccagagacgcctgccggaattcccgatgcctatcaggataagatacggacacaaccttatcccaaagcagataatgaattgtatctgaatcctgctcctcttattgttcctcaagccatgaagacgggcgaaagactgcaattttccctttcacgtactgaagatttcagcagttccgaaacgctactttccgaaccgcaggaatggtgtatgtataatcttcatcgtcgtttggaggtcggcacatggtattggcgctttcgttccaccaaccttaatggaactgcgcccggtgaatggagttctatttatcgtttcgaagtaaagaatgatacaccggaatttgtaacacctccttttcagacattcttagcaaatgctccccgtctgcatcctcgtatttactgttttttagacgaccgtatcggagaggctcgtaaccgtgtcacttcacacccagaatatgcagaactacaaagtcgtgcttctcaggcattgaaagccgaatacaccggaatgactgatttatatagtcgtgcagaagagctccggcaacatgccacttatctttatcaggcctatcatctaattcaaaaagaaatttatgccgaaaagttgcgtcagcttctcgaagcgttgattgtcgctccccctgctgacggacaactttttgcatccaactttactgccagcaacatcgcatggtgtcttgttgcagcctacgatctgctttataataacttgtctgcttccgatcgtactgcttccgaagaactgatgatgcgtgtggcacgttactattacaaggtaaattgcggttttcaggaaaaccatctctttgataatcatttttggcagcagaatatgcgcatcctctttcaagtggctttgtcgctttacgacaaatcggcctattcttccgaagtgctgcccatgatggagtattattatgaattgtggacagcccgagctcctgcctccggcttcaatcgtgacggtatatggcataatggcacaggctatttcagtgccaatatattgactttggcgtatatgccgtctcttctttcattcatcagtcagtacgattatctattgcatccgtggtatcagaatgtcggacgctcgctggtttatacttgtccgccgggatcgaaaagcaatggctttggtgacaatagtgaaaagggtagtgaacccaaccgtctggttgccgcctttgctgattatctggcgtgtgaaacgggtgattcctatgccggatggtatgccggagaatgtcgggagctgttgcgtcgggattatgaattgcgtctttaccggatgtgtaccgagcaggattacaacacagcttttcctgccggggctgataaaatggtgtggtataaagatgccggtgaagtagccatgcacagtgcaccggaagatgtagaaaaagatcttgcactctcgttccggtccagtacattcggatccggcagtcacactactgccagccagaatgcctttaatctgttgtataagggtgtcgatgtgtatcgcagtacaggctattatcagaattttagcgatgctcacaatctgatgtcctatcgccatacgagagcgcataattcactgttggtaaacggcatcgggcaaccttattctaccgaaggttatggcagtgtgatgcgtgctatgggcggacagcatattagttactgtttgggagatgcttcacatgcttacagaagtatcagcaatgacccgatgtgggttgactacttcaagcaggcaggtattgagcagacgcctgaaaatggattcggtgccactccgttgactaaatatcgtcggcacgtgttgatgcttcatcctcatacagtaatagtgtatgatgaattggaggcatcggaggctgtccgctgggagtggctgttgcatagtcctacggaatttaagattgatgcggtaaagaaaacgttgtctacagataataagaccaaaggatgggtggctgtgacacaactttttggaggacatgtttttacgctgtcccaaacggatcgttttgtagtgccgcccgccatcaccggagcagagtatcccaaccagtggcacttgactgcacgggttgacggttgttctgccacccgtttcctggctattattcaggtaggagatgaggctgtttctattgttaaccgtgatggtgatacctttaacgtaggcgactggacgatcaaagcggttttggatgcttctaaggctccggagctgacagtgagtcatcgcaccgaacaagcagtatttagttatggaacagacaatcctgcgttgaatggcaatttttactctcgacaatatacgggttcctcgttgctttacgacgagatagacggagcttatcaggtggtagaaatgaccgaccggagtcctatatctacccgggtagtaaatcaatgataaacaatgaaacatagtgaatataaataacaaacagaatatgatgaaaagtagaattatttgcattttgttgcttcttgtcggtgtatccggcatttatgcccagagtttgaccgttaccggtaaggtggtggacaacgaaggcttggaagtgattggaggaaatgtgaccgtgaaaggaaaacaaaacacgggtaccattaccgatatcaatggtaaatacaccattaccgttagtgatccgcagaaagatgtcttggttttctcttttatcggactggaaaatatggaagtacccgtaaaaggaaggaaacagattgatgtgaccatgaaggctgcgtcggtattgttggatgaggtggtagctatcggttatgcaacagtaaagcgtaaagacctgaccggttccgtggcttctgtgagaagcgacgatttgctcaaagttccttcgtctgatgtaacccaggctttagcgggacgtatggcaggggtacagattatacagacagacggtcagcccggtgctacgatgtcagtgcgtgttcgtggcggtatatcaattacgcaaagcaacgaaccgctttatattatcgacggatttccgacggaagatggtatgtccagccttgatcctgccgatattgaaagtattgatgtgttgaaagatgcttcggcaacagcaatttacggtgcccgtggagcaaatggcgtagtggtaatcactaccaaaagcggtgcgaaaggagaaggaaaagcaacacttactttcgattcttatgtaggtgtgcgtacgcttgccaagcggttggatgtattaagtgtagaggaatttgtgttggcggattatgaaagaacattaggcgatgctactgatcccgaggaaagtatgcggtcatggcaaaatcgttacggtggttttgtcgatcttcatgagaactatggcaatcgtaaaggtatcgattggctggatcgtacgatgggacgcactaccgttacgcaaaattaccgggtaggcgtcaacggtggtaatgataagttgaactacaatatgtcttatggttacttcaaggatgaaggtgcgatggtatatagcggcagcgacaaacataatattgcgcttagcgtgaaaagcgaagtgaataagcggctctccgttacaggacgtatcaacttcgattatctgaaagtgtatggagctggtgttgccggaaatggaacgaatgaaggcggaagcaatgtagatgcaaagtttaataaaatggttcagattttgcaataccgtcctactattggtatacgtggtagtgattcggatttgttggcaggagaagatcctgtattaagcgatgcggatggaaacgtgatgcagaatccattgattgccgccgctgaagaaaaggataataaggaaacacgcactttgcaagccaatggcggactgactttcaaaatcatcaaaggattgaccttccgtaacaatacaggtatgcgttatcaactttatcgccgggagcttttttatggcgaccaatctataatgggaagacgcaacggtatttacggctctatcagaaatacagagaccggaagttttcagacctctaacgtcctgacttatgacaaacgttttcagaagaagcataaagtagtagtgcaattgggacaggaatttgtaaaacgctggactcgtgtgctcgaatccggtgtcagtgggttgcctaccgatgagttcattttgggagatatgagtctgggtactccgtccgttgcttcgtccgatgaaaactatgatgataatctgctctctttctttgctcgtctcaattatgactttacggataagtacttgttttccgcaactttccgtgcggatgggtcttctaaattcggaaagaataataaatggggatactttcctgctgtatcggcagcatggcgtgtaggtgaagaggattttataaagaaactgaatgttttttccgacttgaaattccgtatcggatacggtttggcgggtaacaacagaatcggtagttataacagccttgctttgatgtcttccatcatcacagctatgggagatcagcttactcccggttatgcttccaagcagataccgaatcccgatctgaagtgggaagcgaacaagacttttaatatgggggtcgatttaggatttctgaatcaacgcattaccatttcacccgaattctatataaataggagtagtaacttgctgcttaacgcccagttgccttattcttccggttatcagagtatgttgattaatgccggagaaacgaagaatgtaggtgtggaactgactgtgaatactgtgaatttctctacaaagaagtttagttggaacactacactgacgctgtcgcacaataaaaattccgtgaaagcattgaccggtgaggcggtacaactctatgaagccaagttcggctttaaccaaaatacccatcgtattgctgtcggagaaccattaggacagttctatggttacatcaccgaggggctgtatcaggtagatgatttcaattatgatgcttctacgcagacctataccctgaaagatggtgtaccttatcatggtgataaaggtcagattcgtccgggcatgtggaagtttaagaacttgaccggagatgataatgtgattgatgaaaatgataaaacggtcattggtaacgctcaaccgaaattctacggaggcttgaacaattcttttacttacaaaggatttgatttaagtatattcctgactttcagctatggtaacgaagtgttgaatgcgaccaaactggttaccagtaaggtgggtagcctgaactacaacgcattggacgtgatgaatagctctaatcgctggatgaccatcaattcggatggacagaaagtgacagatcccggagaactggctgctttgaatgttggtaaaaccgtagccgcttatcatgatgctcaacaaggagataactatattcattcatgggcagtggaggatgcttcctatttgaaactaagtaatgtgactttgggatatacattccctaaaaatctgattgcaagggtgggattgaaaaacttgcgtttgtatgccactggtaataatctgttaacttggaccaagtattcaggtttcgatccggaagtctctacgatgaaaagcggtttgacaccgggtgttgactttggagcgtatccgcttagccgttcttttatttttggtctcaacgtagcattttaattctttaaatacatagtaatcatgaaaaagatacatctattatatgtcgtattcgccttgttggcaacaggattttcctcttgcgaggatttgctaacggaagaacctaactcaaaatatgaccgggaccgctatttcgattcggaagataaagcggaaatggcagtgatgggaatatatagttcattgtcggactttaatcattacggttggtacgaaatggcttctcccgcatcggacgatacctattatacggctcgtacgcagtctgacaatcaggttcacgatattgcacattatcagctaaactccacgaacacatggattgaaagtatctggaaactgaaatatgagggaatcgaccgggctaacctcaccattgacggaatctgtggcatgacaggatacgcagaaaatacccgcctgaaagcattggaagcagaagctcgctttctgcgtgctttcctcgcatttgatttggtgagatattggggagatgtgcctttcaaaacatcttattcttcatcctacgaatctgcttttggtgaacgtgtggacagggaagtgatttatgacgagattatatctgaccttactttcgctaagaacaatctggattgggcaactgcttcttccagtcccgaacgagtgacgcaaggagctgcccgtgcattgctgatgcgtgtctatttgcagcgtgcaggatatagccttcagtcgaatggacagttgaaacgtccggaggacagtaagcgaatggaatatttcgatgcagtgatagaagagtgggaggcttttgaaaagaaagggtaccatgatttttatgacggtggttatgaggcactctttaaaagctactcgcagggggtactgaataataaggagagtctttgggagattgctttctatcattcgcaaggacgtcgtaatggtggagcatgggggatttataacggtccgcaggtggcggaacctaccggagtttctgcatctgaatcaagtcagtatatgggacgtgccaatggtttctttatagtcgttcccgaatggcgtaacttcttcgaagcgagcgataaacgccgtgatgttgctatttgcacctatcgttatacctggaatggtactaaaaaagagcatgtaaaagaagaaagaagcgcaggaagctggtatgtgggaaaatggcgtcgggaatggatgccgaaagagtcatggaacaagaatatcaattatgcggatgtgaactattgccctttgcgttatgctgatgtggtattgatggctgccgaagcgtataatgaaacaggaacagatagacaaaaagcatgggatttgctgaatagcgtacgtacacgtgctgaagcaacttctattacagaagcgaattatgatgaaatgatgagcgtacggaaaaagacacataacctgactttcatcgacgactctacaccggaaggaaagttccgtacagctctttactgggaacgtggctttgagctggcttttgaaggacaacgcaaatatgatctgatacgttggggagtactgggcaaggctctgaaactgtttggtgagatcagttccgtcaatcagaaagagaacaaaccatatccggcttaccggaattttacggagggtaaacatgaacttttccctatccctctgaaagagatacaaagtaatccgaaactcaatggaatgaataataacgggtattaagaagactctcaatagaataggcgactggaaaaatatacaaaaatagtttgccaattcaaagaaaagccgtacttttgcaagccgattattatcacaaaatgataagagattaattcatagcaagttagtattcctttgtccggggaagactaatgagtggtgaagaaaatttttagtagtaacatttaaaaaacaaaattagagtggatactttaagttacaagaccatttctgcaaacaaagcgactgtaaccaaagaatgggttatcgttgacgctacagaccagactttaggtcgtctgggagcaaaagttgcaaaattgctgagaggaaagtacaaaccaaactttactcctcacgtagactgcggtgataacgttatcatcatcaatgcagacaaagtaaaactgactggtaacaaatggaatgacagagtttatttgtcatatactggttatcctggtggtcagagagaaatgactcctgcccgtttgattacaaaaccgaacggtgaagagagattactgaaaaaagtagtgaagggcatgcttcctaagaatatcctgggagctaaattgctgaataacttgtatgtttacgctggtagcgaacacaaacaggctgctcagaacccgaaaatgattgatattaattcatataaataagatataatggaagtagtaaatgcattaggcagacgtaaacgtgctattgcacgcatattcgtaagcgaaggtacaggaaagattactattaacaagagagaccttgcagagtactttccatcaactattcttcagtatgttgtaaaacaaccattgaacaaactgggtgctgctgagaagtatgacatcaaggttaacttgtgtggtggtggtttcactggtcagtctcaggcattgcgtttggcaattgctcgtgcactggttaagatgaacgctgaagataaagccgctcttcgtgcagaaggcttcatgactcgtgaccctcgttctgttgaacgtaagaaaccgggacagccgaaagctcgtagaagattccagttcagcaagcgttaatgtgctgcctgatagaggaatatgtttagtatctaaactactgggactctgttcatagactacccagcggttggtttagaaaaaacaaaaaagaaagtaaacgatttaaagaaaaaacaagatgtcaagaacaaattttgatacattattggaggctggttgccacttcggacaccttaagagaaagtggaaccctgcaatggctccttatattttcatggaacgcaatggtattcatatcattgacctccacaaaacagttgcaaaagtagacgaagctgctgaagctttgaaacagattgccaaatctggcaagaaagttctttttgttgctactaaaaaacaagctaaacaagttgtagctgagaaagctcaatctgttaatatgccttatgtaatcgagcgttggccgggtggtatgttgactaacttcccgactatccgtaaggctgtgaagaaaatggctactatcgataaattgactaacgatggtacatattctaacctctctaagagagaagttcttcagatttctcgtcaacgtgcaaaattggacaagactttgggatctatcgctgatctgactcgtctgccgtctgcattgttcgtaatcgacgtaatgaaagaaaatatcgcagttcgcgaagctaaccgtttgggtatccctgtatttggtatcgttgatactaactctgatccttcaaacgtggatttcgtaattcctgctaatgatgacgctactaaatcaatagaagttatcctggatgcttgttgcgctgcaatgatcgaaggtttggaagaaagaaaagctgaaaagatcgacatggaagcagctggtgaagctcctgctaacaaaggcaagaagaaatcagtaaaagctagactcgacaagtctgacgaagaagctatcaacgcagctaaagctgctgctttcatcaaggaagacgaagaggcttaatatataaaatgtgccaatttgctaatgtgcaagggtattgttatacacttgcatcttgattggcagattggcacattttttgtttcgaaaattattattcatttaaataaaggaaattattatggctgtaactatggctgatattaccaagctgcgcaaaatgaccggagctggtatgatggattgcaagaatgcattaacagaggctgatggcgattacgacaaggcaatggagattatccgtaagaaaggacaagctgttgctgctaagcgttctgaacgtgaggcttctgaaggttgcgttttggctaagactactggtgactatgccgttgtcattgctttgaagtgcgaaactgacttcgtagctcagaatgctgactttgtgaaactgactcaggatattcttgatcttgctgtggctaacaaatgcaagacattggacgaagtaaaagcattgccgatgggtaacggtactgtacaggatgcagtgactgaccgtagcggtatcacaggtgagaaaatggaacttgatggttacatgactgtagaaggcgcaagcactgctgtttacaaccacatgaacagaaatggtctttgtacgattgttgcttttaacaagaacgttgacgagcagttggctaagcaagtagctatgcagattgctgctatgaatccgatcgctattgatgaggatggtgtttctgaagaagtgaagcaaaaagaaatcgaagtagctatcgaaaagacaaaggctgaacaggtgcagaaggctgtagaagctgctctgaagaaggctaacatcaacccggctcatgtagacagcgaagatcacatggaaagcaatatggctaaaggttggattacagctgaagatgtagcgaaagcaaaagaaatcattgctactgtttctgctgaaaaggctgcacatttgcctgaacaaatgattcagaacatcgctaagggtcgtctggctaagttcttgaaagaagtttgcctgctgaaccaggaagatatcatggacgctaagaagactgtaagagaagtgttggctgctgctgatcctgaactgaagattgttgacttcaagcgtttcactttgaaagctgaataatctgattcaaatcttgttaagtactacttacaaagtcagatttattatatgtaaaatttgggaaaagggttcggtattgcaccggactcttttttctttaaggcatatcttaggatagggactacttcaatgctttatctatttgcttcatcagcgtatctatggctccatcttcatagccggtagtagctgatattacttttccttctttgtttattaaataacttctgggaatcattttggtggcaaatttacctgtaacttcccgtttgggatccgggtagaggggaaatgtaaacctttttcttttattgtattccgctaattggtcgtctgtatgctcgcgaccgatcactaacatacagaaatccttgttgtttttatatttaggccagagtattttctgaacttcagccagttcgctttggcaagggccgcaccaggtagcgaaaatattgattaatacaactttcccttttagatctgcagagtttatggtgccgtttgctgttgaatgaagggtgaaggcaggtatattgtcacctacctttacaatatccgcatcactttcttgtgcgaatgacaacagtgagaatagtgttgccgcacagaataatattacttttctcatttcttgtattatttaatttaacctcctatacctttggttttagtatatccttctttgatgagtagatctatgatcttggtcttgaaatctccttgtaccattatctctccgtctttagctgaaccgcctactccacatttgcttttcagtaacttgcctagctctttcaaatcattatccgtacccacaaatccggtaattaatgttaccactttaccaccccggttctttttgtcaatggaaactcgcaggttttgcttgtctttgtcgagggtaacctgttcttcatcgttatccatttcataaccgaagtcaggattcgtggagtacacaacgttcaatctatctttccaatcattatttttcatacttgtcatttttaatccttttcaaaagtattaaacttatcgaaaagagcaaaatttgagtctcttttcatcgttttgtttaatctctattaaggttttctgttatagggttgtcagtctcaaaaaataatgtacttttgcaaaataccaaattttgtaagaagtatgagcacttatatacgaaaagaggcggataaagtgccggagcctaccttgcgcagacttccctggtatctgtccaatataaaactaatgaaagataaaggggagcagtatgtctcttctacacaaatctctaaggaaataaatattgacgcttcccaaatcgccaaggatttgtcatacgtcaatatctcggggcgtacgagagtgggatacaatattgatgcgctgattgaggtgttagagagttttcttggatttaccaatatgcacaaagccttcttgtttggtgtaggtagcctgggggctgctttgcttcgggattctggtttgcatcatttcggactggagattgtggctgcttttgatgtgaatccggaactggtgggaaaagacctgaatggtattcctatttatcattccgatgactttgaagcaaagatgaaagaatacgatgtaaatatcggtgtattgaccgtacctattaatattgctcaggaaattacagataagatggtagacggaggtataaaagccgtatggaactttactcctttccgaatccgtgtacccgagaatatagtggtgcagaatacgtctctatatgctcatttggctgttatgtttaaccgattgaattttaacgagaaataatgaagattattgcagtaggaatgaactacgcccagcataacaaagaactgggacatacacaagtaaatacggagccggtgatttttatgaagcctgattctgctattctgaaggatggcaaaccgtttttcattcccgacttttctaaagagatacattatgaaacggagctggtggttcgtattaatcgattggggaaaaatatagctccccgctttgctaaccgttattatgatgcagtgactgtagggatcgactttacggctcgtgaccttcagcgaaagttccgtgagcagggtaatccctgggagctttgcaaaggttttgattcgtcggctgctattggaacttttgttccggtggagcactataaggatattcagaatcttgactttcatttgttgatcgacggtaaggaagtgcagcgcggttgtacggcagatatgcttttcaagatagatgatataatcgcttatgtaagccagtttgtaactttgaaaattggtgacttgctctttactgggactcctgtgggtgtaggtcctgttagtatcggacagcgtttgcaaggttatctggagggagaaaaactgctggatttctatattcgttgatctttttttattcattagtactcatttgttatataaaatatgaagataagagtaggctttggtttcgacgtacatcagttggtcgaaggtcgtgagttatggctgggtggcattcttttggaacacacaaaaggattgctggggcattcggatgctgatgtattattgcatgctgtttgcgatgctctgttgggggcggcgaatatgcgtgatattggctatcatttccccgatacggcaggagaatttaagaatatagatagcaagatactgctgaaaaaaacagtggagttgattgctaccaaaggatataaagtgggcaatatcgatgcaactatttgtgccgaacgcccgaagttaaaagcgcacattcctttaatgcaggagacgatggcaactgttatggggattgatatggatgatatttccattaaggcgactactaccgagaaactcggttttacaggtcgtgaagaaggtatatcagcttatgctactgtgctgatagagaagatttcttaaccccctaaaacaaataattatgattcgtctttttaaaatttacttaacacttgccttcttattggtaacgactttttgtatggctcagaagagtgaactgaaatttagcaaagatggtaaattcaagattgtgcaatttaccgatgtgcattttaaatatggaaatcgggcttcagatatagctctggaacgtattaatcaggtgcttgatgacgaacgtccggatttggtgatatttaccggtgatgttgtttattctgctccggcggattccggaatgttgcaggtactggaaccggtagttaaacgtaaactaccttttgtggtcacttttggtaaccatgacaatgaacagggaatgacacgggaacagttatatgatatcatccgtcaagttcccggcaatttattgcctgatcgcggaacagttttatcgccggattatgtattgacagtgaaatcgtcttccaatctaaagaaggatgctgctttgctatattgcatggattctcactcttattctcctttgaaagatgtgaaggggtatgcatggcttacattcgaccagataaattggtatcgtcaacagagtgcggcttataaagtgcaaaacggcggacagcctctgccggctcttgcttttttccatattcctcttcctgaatacaatgaagctgcccgtagcgaaaatgcaattcttcgtggaactcgtatggaggaagcctgtgcgcctaaattgaatacaggaatgtttgcagcgatgaaagaagctggtgatgtgatgggtatgtttgtaggacacgaccacgataatgactatgcagtgatgtggaaagatatccttctggcttatggacgctttaccggtggaaatacggaatataaccatttgccgaatggtgcgcgtatcatcgtattggatgagggtgcccgtacattcacatcttggattcgtcagaaagacggtgtggtggataaaatctcttatccggcaagttttgtcaaagacgattggactaaacgttgaggcttgcgaacttcacatggctaaggcgcgtgtattttgaaccatagctttcgtatcggcgcgatactttcgccgatgcaacgtagataatatctcccagtcggtattcatgttctatcccggatagagtgcatgaaaccgcactgggattttttgatggaatactcatggtgactaaatttccactggcatcggtcaaagtcagtacctgcttgacaaaaaactgtggggtagtgccgttcactcttgttttgtacggatcgtcttccaatcttacccgggtgacttttaattttaagtctgtcagcttttctcctaattctcccagataacggctggatgaacgcttctccctcgattttcttatcattatatccaggtgtatggaatgataagcttgtgctattttgacgaaacgttcctgtttcggtattttgggaatgaatttgtatgctacccaacttaggtaggcgggatctattttgaggatttcatgtagaaaatgtccccggtattttccgaagaagataagatcgtcaccgttactctgcattcttttctcattgtaatctaccaggatgatgcaacgcttcgaataataaaacatcgtgctggccatccgcagggattcgttgatgtctggtgacaggtcatgtatataaagaatggattgcttttcgggcaggggagagtacagccaaagggaataatttggtttccccggtcggggcaacaccaccaggtagactcctacctctttaaaagaggctctgcctcggttgtactcattcaatttggcatacaataaggcttgctcgttttcggaaatgcccggtaatctggggttagccataattgttctcgcttttggtatatttcaaatataaggattttctttcagaaaagcaacttttctctttgaaatctcgtacatttgtatccatgtaaattttcaaaattcgaatggaagaacgaaataagagagtattggtaggtatgagtggtggcatagacagcaccgctacttgcttgatgctgcaggaacaaggatacgagattgtaggggttaccatgcgcgtatggggagatgaaccacaggatgccagggagttggctgaacggatggggatcgaacattatgtagcagatgaacgtattccttttaaagaaaccatcgtaaaaaacttcatagacgaatataagcaggggcgtacaccgaatccgtgcgtgatgtgtaatccgttgtttaagttccgtgttttgacggagtgggcggataagttgaattgtgcatgggtggctaccggacattattcacgattggaagagaaaaacggaaatatttatatagtagccggagacgatgataagaaagaccagtcgtattttctctggagattggggcaggatgtgctgaaacgttgtattttcccattgggagattatacgaaggtgaaggttcgtgagtatcttgcagagaaaggatatgaagcaaagtcgaaagaaggagaaagtatggaagtctgctttatcaagggggattaccgtgattttcttcgtgagcagtgccccgaactggatagtgaaattggaccgggatggtttgttaactctgaaggagtgaagcttgggaagcataaaggagcaccttattatacgattggccaacgaaaaggattggagatcgctttaggaaagcctgcctatgtgttgaaaatcaatccgcagaaaaatacggtgatgcttggaaatgccgaccagctggaaactgaatacatgttggcggagcaggataaaatggtggatgaacgggaattgttcggatgtgagaatctgacggtacggattcgttatcgcagtcgtccgattccttgccgggtgaaaagattggaagacggacgtttgttgatacatttccttgaaatagcttcggccattgctcccggacaatcagctgtgttttatgatggaaaacgggtgctgggaggagctttcattgcttcccaaagaggaatcgggctggtgattatggaaaatgaagaattatgattgattaaaatagaaagataacttatgaagaagtttatagtattgattctcgctttaaatatgtatttgggtgtgtttgcccagtttactccgggagataccttaaaatatcgaattagtctgaaagacaaagcggctacggactattccttgcaaaaaccggaaaagtatttgtctaagaaatctatcgagcggagaaaaaaacagggattgcctattgattctaccgatttaccggtttgcaggaaatatgtagatgccatacggaaaacaggtgttcatgtacttgtgaccggaaaatgggataatttcgtcactgtttcttgtaatgacagtatgttaatcagcgaaatagctcaactgccttttgtacgttctacagaaagagtgtggaaaggtatcacgcaaagagcatttcaaagagactcattgataaataaaccgttgcgcaccgatagcctttacggtcctgcaatcacgcaagcggctatgagccgcgtcgatctcctgcatgatgcaggttttaagggagagggaatgaccattgccgtgattgatgccggcttccataatgtggataagattgatgccatgaaaaatatccgtatcctcggtgtgcgtgactttgtgaatccggaggcagatatttatgcagaaagcagtcatggaatgtctgtattgtcctgtatggcaatgaaccagccgcatgtgatgattggcactgctcctgaagcttcttattggttgctgcgtagtgaagacgaatattcggaaaatttggtagagcaggattattgggcggcagctatcgagtttgccgatagtgtaggagtggatttagtgaatacatcgcttggttactactcatttgacgatcctgcgaagaattatagataccgtgacttgaatggtcattatgcgctgatgtcccgtgaagctgcgaaggctgccgataaaggaatggtagttgtttgcagtgccggaaattcgggcgcgggttcgtggaagaagattactcctccgggagatgcggagaatatcataactgtaggagctgtaacaaaaagaggagaactggcgccgttttcttctgtaggaaatacggctgacggacgtgtgaagcccgacgtagtggctgtcggtttaaattcagatgtgatgggaacggatggaaatcttcgtcgcgccaatggaacctcttttgcttctccgattatgtgcggtatggtagcttgcttgtggcaggcttgtccgaagctgacagcaaagcagattattgatttggtgcgtcagtcaggtgacagagctgatttcccggataatatatatggatatggtattcctgatttgtggaaggcttacctccagtcttcttccacagaaaggaaataagtgtccttgctaactaattatctattgtaaaacacggaatttgtagttgctttcaagttactcttatttaaaaaaagtgtgtgacctgttcctgatttattatataaacgaatgatgctcaataatatgtataagtccaagcaatcagaatctccctctttggaagagggtggggagaggctttctcttttagaactgaatgcactcgtgcgccgtagtctggagcaatgcctgcccgatgaatattggatacaggcagagttgagcgatgtccgttccaatacgacagggcattgttatctggaattcgtgcagaaagatcctcgcagcaacaatctcgtagccaaggcacgcggtatgatttggaataatatctaccgcttgttgaaaccttattttgaggaaaccacagggcagctatttacttccggcattaaggtgttggtgaaagtaacagttcagtttcatgagctatacggttatagtctgacggtacttgatattgatcctgcttatacattgggagatatggctcgtcgccgtcgggaaatattattgcagttggaagaggagggagtgttgacgctgaataaagagcttgagataccgattcttccccagcgtattgctgtcatttcttcggctactgcggccggatatggagatttctgtcatcagttgcagcacaattcgggcgggttctttttctatacggagctttttccggctttaatgcagggaaatcaggtggaggaatccgtgttggctgctttggatcgtattaatgcccgcatcaatgaatttgacgtagtagtcatcattcgtggcggtggagctacttccgatttgtccggctttgatacttatctattggcagctgcatgtgcgcaatttccattacctattattaccggtattgggcatgaacgcgatgatacagtgcttgattccgtggctcatacccgggtgaaaactcctacggctgctgccgaactcctgattcaccaggtagcggaagtcgcggagcatctggaagaattatctatgcggattcaacagggagcttatatgcttcttgatctggaacgacgaaggttggaaactctccaaacccgtattcccaatcttgttcatcgcaaacttgcggacgcccgtttttctttgctggcagcaaagaaagatttgtcacaggtgacgaaagcattggtggcccgtcaatctcaccggttggaacttttgcaacaacgaatagcggacgcttctccggataaacttttgagtcggggatatagtattacaataaaggatgggaaagcggtgacggatgcttctttactgaaaccgggagagcatttgataacccggctatcgaaaggagaagttcgatcggtagtagaaaagtagctatccgtcaaacgtgtatttgtaaaaacattcattattaaccattaaatatcaatcatcgtggcagtaaaaaaagaaacatattcccaagcaatggaacgtcttgaaaagatcgttcgccagatagataataacgaactggatatcgacattttgagtgagaaaataaaagaagccaatgaaattatagccttttgcaaggataaactaacaaaagccgatcgggaagtcgaaaaattattgcaagaaaagaggcaatctgaagaataaaagttatttttgcgtttcaatgcaatggaaaataaactaatacataacaatatgaaagaaatagactgggcgaatctgtcgttcggatacatgaagacagattacaatgtgagaatcaacttccataatggtgcatggggagaattagaggtcagtagtgatgaacacctcaatttgcacatggcggcaacctgtttacactatggtcaggaagcttttgaaggactgaaagcattccgtggaaaagatggcaaagttcgtattttccgtttggaagaaaatgctgcccgtttgcaatctacttgccagggaattctgatggcagaacttccgacagaacggttcaaagaagcaatcctgaaagtggtgaagttgaatgaacgttttatccctccttatgaaaccggtgcttctctttacattcgtccgctgttgatcggaacaagtgcccaggtaggcgtgcatcctgcagaagagtatatgtttgtagtattcgtaactccggtaggaccgtacttcaaaggtggtttctctaccaatccgtacgttatcattcgtgagtttgaccgtgccgctcctcatggaacaggtatttataaagtgggtggcaactatgcagccagtcttcgtgctaacaagaaggcacatgatctgggctattcctgcgagttctaccttgatgcaaaagaaaagaaatatattgatgaatgtggtgctgccaacttcttcggtattaaggataatacttatatcactccgaaatcatcttctatcttaccttctattaccaataagagcttgatgcagttggcagaagacatgggtatcaaagtggaacgccgtccgataccggaagaagaactggaaacatttgaagaagctggtgcttgtggtactgccgcagtaatcagcccgattcagcgtatcgatgatttggaaaatggaaaatcttatgtgatttctaaagacggcaagccgggacctatctgtacgaaattgtacaataagttgcgtggaatccagtatggcgacgaaccggatacacatggttgggtgacgattgtagagtaattgtatattatgaaataacacatttatcaattaatattattcactatgttaaaactaaactcagaactacgtgcgcaggcgcgtgaggcacttcgaggaaagtggcctatggcagccgttgctgcacttatttattcagcaattgccggtggattatctgctattcctgtgattggcggattatgttcattgtttgttggacttccggttgcatacggctttactattgtaatgcttggcgtatgtagaggcaaagacattgattttggtgttttgttcgaaggctttcaggattatggacgtatttttgtaactatgttgcttcaggctgtctatacaattttgtggtcactgttgctggttataccgggtatcattaagtcttattcttatgcaatgacatcttttatcttgaaagatgaaccggaaatgaaaaacaatgcagctattgagaaaagtatggctatgatggaagggaacaagatgaagctgttcatgcttgatttaagtttcattggctgggctatcctttgtattttcactttgggtattggacttcttttcctgcaaccgtatgttgctatttcgcgtgctgctttctatgaagatttgaaagcacaacaaggcggaagtgtagaggtaaacgttgaagtgaatgttgagatttgataagactcattcagtactatagaagaatggagcatagagaaatctgtgctccatttctttttgtcggttgcttcaaaatcagtacctttgcaacctaatcaggattgatatgggaaagaataaattagaaaagtttgccgatatggcgagttatccgcacgtgttcgaatatccttattcggcggtagataacatgccttttgacatgaaagggaaatggcacaaggagttttttaaaaacgatcatccgattgtgctcgagttgggttgcggacgtggtgagtatactgttggcctgggtaagatgtttcccgaaaagaactttatagcagtggatataaaaggcgcccgtatgtggacgggagcaacggagtcattacaggccggaatgaagaatgtcgctttcctgcgtaccaatattgaaatcatcgagcgtttttttgctgaaggcgaagtgagtgaaatatggcttaccttctctgacccgcaaatgaagaaagcaaccaagcgactgacttctacctattttatggaaaggtatcgcaaatttttgcaaccgaatggtattatccacctgaaaacggacagcaactttatgtttacctatacaaaatacatgattgaggcgaacaaacttccggttgagtttatgactgaagatttatatcattctgatctggtagataatattctcggtattaaaacctattatgaacaacagtggctggatcgtggtttagatataaagtatatcaaattccggcttccgcaggaaggtaaactgcaagagccggatgtagaaatagagcttgatccctatcgtagctacaaccgcagcaagcgtagcggtctaagcacaagcaaatagcttgccgggacaatcaccctaaagtgaaccggcagccatctgaatagtgactttaaatagtaatttgtaaatcgtcaaatagtaaataaaatgactctctatcctaaattgatattggatgcattggcaacggtgcgttatcccggtacgggaaagaatttggtggaagcggagatggttgccgataatctccgtattgatggtatgactgtcagcttttcattgatctttgagaaaccgactgatccgtttatgaaatcaatgttgaaagctgcggaaacagctattcatacgtatgtctctcctgatgtgcaggtaacaatcacagcagagagtaagcaagccgctcgtccggaagttggcaagctccttccacaagtgaagaatatagtcggtatatcttccggtaaaggtggagtaggtaagtctacggtgtctgcgaacttggcagttgctttggctaaattaggctataaggttggcttgctcgatgctgatattttcggtccttccatgcctaagatgtttcaggtggaggatgcacgcccctatgctgaacgtatagatggtcgtgacatgattattccggtagagaagtatggcgtgaaattattgtctatcggtttctttgtcgatccggatcaggcaactttgtggcgtggcggaatggcaagtaatgcgttgaaacagttgatagctgatgcagcctggggagatttggattatttcctgatagaccttcctcccggaaccagtgacattcatttgacggttgttcaaacattagccatgacaggagcgattgttgtcagcactccgcaagcggttgctttggcagatgcccgtaagggaatcaatatgttcaccaacgataaggtaaatgtacctattctcggtttggttgagaatatggcttggtttactcccgctgaactacccgagaataaatactatatctttggtaaagaaggtgccaagaaactggctgaagaaatgaatgttcctttgttggggcagattcctatcgtgcaaagcatctgtgaaggaggagataatggtactcccgttgcattggatgaagactccgtgaccggacgcgctttcttatccctggctgccagtgttgttcgtcaggtagatcgccggaatgtagagatggctccgactcaaatcgtggaaatgcataaataaatggaatctggagttggatagctttgcagtaagttatccataggatatagagcgagcctctgtagtcttttcaaagactatggaggctcgtttatttattaggatcatatagaatccgttgttggcggattctcttctacaaaatagtgacgctatccaatataaatagtgacggtatatgacaacgataccgtcactatcctaagcatataccgtcactatcctaagcatataccgtcactattttttctatatcaatcaggggtcttgcatttatttatggcgtatatcaacaacgatttctgcttgatctattttttacgtttgaattatttattcaaagctttcatgagttcttttttcatggtgtctactccgggaaatccagtttgtttgaaggtgatattaccctccggatcaacaacaaaataagtgggaactcctcggatattgaagttggacattagaaagctccattgctcatttgtcacacggaaatgctcaccatgaatatcggtaatcatgttttcccaggtacctttgggggaagtttcgcctgtgatgtagaggtagataatatccttgtcttttaattcctctttcattggagtgatggctttattagctgtgcgacaagggccacaccatgttgcccaaaaatcaactaacagtgtgtgtccccggaatttagagataatggatgggaataaatcttcattggagacttgtccagtctcgttaacagtgaagcctgtctttcttttgtttaattctatcttttttattatctctttgttaacttgagtaagcatctctgcatataccggggaagaaaaagtctttaattcaacattctgttctgctgttaacggggtaaaatccttaatggattgatatagcttattaaatttaatgttatcgaatagaggtccctgtcccgttcttagtgtctctttaagtacatctaaagaattcggcagaaagtttattaaatatatcgttgacgcgtaatatttgccgtataaagctttaagagtgttgatagaactgaattccttcagtatgtcatagtagcctttaggagtatcgatgcgggtattataaaaataatcatcagtctgctctctattcagtttgttaacagcaatatgtgctgattttagttctctctccgtcatggcgattttgccggtcgcatccaggtctaccaggatatttaatagctctttgcacgcattgctgtatggggattgcgcaatttcttttcgaacggatggaaggcgctcaagtacataagctttatattcatctgcacttttcccgacaatgtcattgtacatatccatgtaataaacgctttttaatacaatatctatatctactgaagctaattcttgttgtaggctagccagataaccattgaagtatacaggctctccatacgttttatcttttctttgtagatgtgcttgtctgcggcaaagttcctttgtatttataatgagtgatgtctcttcattgggagctatcagacattcaatccaaccaaaaggaaattccaatgctacgcttgtgacagatgcaacctttacttccgccaggaaagtgccgtcctccttgatttttatgatattctgttcgttgtggatattcagtgcaggactttctatgtgcatcttcacttgctttatcatctctttttgatagtctagtatttttcctttaagggtggcagttccatagactaacttaggagtcggcaatatcgctttcttatttattttgtgcacgactgcttctttgggaagtttctgtttatagaatgcgtccttatccagttgtatgccccatatcttatatgctccgtcaaaatctccttccgagaagtccagactggttacattttcgggtatgggaggaaattgtaattggaattccgcttctcctgattccggcatccagaactctttatctaatgtgattccaactcctcttcgaatgggataaagcattccattgttgtctttcaggaaactgcccgtagctatttttatccaatatttaggatgatagaaagcctttatatacactgttgtcactgtatcactcatgacaattttatcgacctcaatactattggaactccatgcaagaaaaggaggacgctcgatcactctgtctttggcttgtatggtgcaggttatgcagaatatcaaaccgataatccatacgaatcttttcatgtgaataatgttttattacacgaacaaatataaggatctttttataactatccttgtaaaaaactaaaaaagaaatgatttttttgtactggagaaggatatatccggctccggggagaaaggtgtttcccaccgatgaacgccccgttcctcaccgatgaggaaagggggcggcaccggagagagaaattactgtaacctgaatacgataggaatggtatacttgacagaaacaggttgtcctttttgcattcctggttcccatttaggcatattacccactacgcgtacggcttctgcatccagtgacggagatacactgcgtaagactttgatattcgacaaacttccgtctttactaataaccatctgtatgatgactctgccttgctccttacttttttgagcgatgacgggatatttgatacttctagccagatattggaacagaccggcttgtcctcccggaaatttaggcattacttctaccatggtgaatacttcgtcttcattttctccttttacactgcctccctctggagttggatcatcttttgcagcatagcccaccaccactacttcatccatgtcggactgctttacttcttctgctttgggaagttcaggaccggatagccggaaagcaacaggaactgtaaatttcacgttcactgcttcccccctttgtttgccgggtttccatttgggcatggcggcaattacacgcatggcttccttgtcgagatacggattgacacttcgctccactttcgtatcggctatgcttccgtcctttttgacagtaaagcttacaatcacacgtccttgtgcaccgattgcatgtgcttcagccggatatctgacgttcttcgataagtagtccatcagtgcctgtactcctcccggaaaatccggcatttcttctacaacctggaagacaacggaatctggtacacttttgatttgagtttccgccatttccttttcttgcttatcccgtggaagtgtagttccttgaatatcttctgtaggaagttccggaatatccgtagtttcagcttgcatggcaacttcttctgttgcttgtcccatcatttctttggcaaatttttcagtggtacgtgctaccatttcgatgttactgacaatcattaagatagcagccaagggaagaaacatcagatattttgtccttcctatttctttcgttcttcgtttattcatcattttaatacgatttttgagtggtaaaacattgaaactatttgataaatttgctgcagccttgtgatgtgccagtcccaacaaatggtactggtatgatttactatcatgccccgtctctaatacacggtgatctgccatgtattcgaggtttcctctgacttcccgtttcatcagccagataaatggattgaaccagcaaaagatacacattatctcgctgataagtacgtctaccgaatggtattgacgggcgtgggtctcttcatgagtaataatttcactgatttcagattccgtatgtgattgtgggtgtatgaatatccagtggaagaaagaaaaagggccggtttttttctttaatagatgtacgcgtactccttgtatcttgctttttgagcattggaagtgtaaccggatgatgctgcccagttgtacaaagaaacgtgtggctagtaataacattccgctccaatagataactttcgcgagctgcatgataaactcttgccagttcattacaggctcttgtaaaggagtaactacttgctccggaaggatgatggttgcataaagatctgccattgccaccattggttcgtgagcttttatccatccctgaatattcagtaaaggataaagcatggagatggcaaagaaacatagcaaagccatcctacgccaatggaagaaggtgtctttatggaaaaacaaccgatagaatgcatagaacagagctatcgctacatttatctttagaaaataagctagttccggagtcatggtgatgaatgttttctattaattttcttttcctttttcaatgagttcgataatatctttgagatcatcggtcgaaattttctggtctttggcaaagaaagaaaccatttctttgtaagagttctcaaagtagttacgaactacgccactcataaaatggcgtttatattcattttcgcgaatggcaggagtatattggtaggtattacccacacgtttcggtgtgacatatcctttccgctcgaggttttttacgatagatgctactgtggtataaggaggtgccggttgcgtatactttgcaacaatgtcttttacgaaacagcattgtaactcccaaatgtagatcattacttcttcttcttgtatagttaacttttccatggagatgttgtttaattacgaatacttcgcaaatctacgaatatttcgtaagcaagcaatagctagtcggttaataattgtaaatgtataaatcttgcaagaatattttaatagtcttattgcgtggaaaatatttaagcataaaaaaagacaggatgagcattatttttatctaaatagtcacactttaataacatttatgcaaaaaatagagtgtgtcggatttttttatataaaataaatgaaatatatttgcggctacaaaacatacgttaaatacggaagagtgcgtttcaatactttaaccggttgcgaataattccccacacttcaaacagaactattaactaacaatgccaaccaaagggaagaggaaggcaaactaaaaaatgaatgatatgaaaaaaggtttgatttttgtgctatttgcacttgtttctatcgtttcttattctcagatttcttggaatgccaaagttggtatgaacatgagtaactttactggggatatggatactgacatgaggattggattcaatgtaggcgttggcatggaatatcagttctctgatatgtggtctattcaaccttcgttgatgttcactcaaaaaggtgctaaacaggatgaagtgaaaatgaatccaatgtatttggagattccggtattggctgctgcaagatttgcaattgctgataaccagaatattgtagtgaaagctggtccttattttgcatttggtattgctggtaagtgtaaaattggtgatgaaaaaattgatttctttggtgacggtgatgatcaatttggagcaaaaagatttgatgcaggtctcggtgtaggcgttgcttatgaaattaataaattctttattgacttatcaggagaatttggtttggctaaattggctgatggtgacggtgcaccgaagaacatgaacttctctatcggtgtaggttacaagttctaaacttattatactctctttataatatctctaaaatccctcgttctatactctcttggaacgggggattttcatgttcttatttgaaaaaaacggcatatcccattgaaaggatacaccgttaattctctctcttgtaattcttactcattaatcacttatctgcttggataagtttgctttctcttttaattctttgtatctctctattgcatgtttgcgactcatcagtatttgccagcggtatacccaacaggtggtcaggaaataaatgccggcttgcaaccacaaagccttatattcaaaagctacttcactaagagtggctcccatattgttgatttttacaaagccgttaattccaaacgttgaggggaagatgtaggatacatacttccaaaacggaggaatagctgctcccggccaggaaattcctgaaataaataacagggggactgatgtgaatacaaaaatcagcatacacgtttcccgattgcgaatggcaatagaagctgtcatcgcaaagaagatacaagccgcaagataggggacaacgaataatattaatgaactgggttgcccaatttggttgaggctaaacaatcttggaacgacataaagtacgtagaaagctaccaatatataaactaggaaataactcaatccttttcctaatacaattcgtaacgtcccgttatagtgacgattaataggtacaagatccttaaatctgttgttctcacgagcagttcctgcagcgagaccgatgccgagcaataatgtctgttggataatcaataccaatacagcaggaatcaggaaagcggcgaacccggcagtggggttgaagatggagatttcttcatattctatcggataagcagtgatttcatcctgacggtcggtcgtgtttccgctacgtgcaattttgatatccctgttcatatccagagaaacggcagtgttggcaagaagcatcgatttatagtataacaatccgctcatgtcgcaatagatactgacttgtgtctgttttcctttggcaatattgtcgctgaaatccgaagggatataaatgataccatacgcacgccgcttctttagcatttgtttggcttcttccatatcagcacagtaagagacgatttgaatatcgggtgtggcatctaccttacggagatattcacgactaagagatgaatgtgaatcgtctacaacaacggcaggaacttcacgcactacttcgttgtcataaatgaaactatacaacaacggataacctaatgggacgagtatgaaaaatatcagcaccccctggtcgcggaaagttgtctgaaactcccgcttccagatataaaacaggtcattgatgccttgggctatcttgtcttttaattttatatctttcatttagggtatatatttatagtaaaccaatgcttccttcaggcgatgaaccacaaagaaggggagcatcataaatattaatagtgccatatagttggtccatgagtaagccatactatatccgttgagtgcttgatcgacgtaaatcaggaaataatgccgcaacgggaatagattactcaaagcctgtagaacaggatgcatagccatgaccgggaatgaaaaaccggaaatggagaacgatatgactccccacagggaagcaaaacttaatccgagtcgtagagtcggcagagttcctatcataacaataccacaacattgagatgctagtacgagacacagtgtggcgaatatcatcgggaatatgccgctattgcaaggaaaatgcagaaatccatacaggtatacattataaaatatacccataatgaaaaagactattgtgtggggaagcagttttcctgccaatgcaatgtaaatggagttgttactcattcgtagccattcgcgggcagtgcgatccttgatttccacaccgattgaataaacggtaaccataaatattaatagcatgagtactcccggtatcagtgtattacataagtataccgaatagttcagccacggattatttagtgggtgtgtatcaattacgatcggttgcagataagccatagcctgatcctctgtcgcacctttggcatacagcatcgttcgggctgcagctccggaggtgagttctcccatcattttcatatccctgaacaatagagagcctgcaatcaggtatgagtaattggtatagaaagagatcgttggctgccgttggctttgtgcctctgccgataaacccttggggagatagaagaacccgtagatttttccctcctgcatggcaatacgcgcatctgttacattgctgtaatgagctacaacccctgtctgcgaaaaagcatccagattgcggacaatattacgggaagtagacgaatcatccatgtccaccactcccgcaggaagatccttgggaagccccgaatccattaaagtggtgaagaatatataacaaaacagcggggcaatgaccatacagaagagatagagcgggcgtgataccaatcgccggcactctctttgcataacctgccacaaagctatatatttcttttctctctctttcatggttacttgtcaatgataacagacatacccggacggagattttccactttctctaccggagaagctttcacctcgaatgttttcagatcaaattgtccggtcgttttggttgctttccaggcagcataagtgcctaagtctttcagataatatactttgagctggatctttttattatccagagcaggaatgatagcttcgaactccgaccccatcgtcaggttcttgagcaaatcttcgcgtacattgaatgttacccacatatcgttgagttcagcgatattcatgataggagcaccggtaccaaccaattcgcctaccttcgggaatatttcagaaacttccccggcagccggagcaatgagataagtctccttaatatacgattcaacttcggcaacagctcctttcgcccggtttaccaaagcttccgcagccatcttatcttcacgttccgctccattcttcgccatggtatattgtgctttggcagctttctctgttgcaatacttgcgtcccgttgcgcagtcacttcatccagtttctgtgcaggcatcactccctgttcgtagagattcttgatgcgttgatatgatttctcggcaatggtaacgcctgcctgggctttttgccacatttcataagccgcctggatttgttcctcacgcgcgcctttgattgcttttgcgttttgtgcctgtgcggcagcttcagcagcacgtgcctgttccatttttgctaccacgtcaggagcttccaaaatggccagcgtatctccggcattgacactttggccttctttcacgcgaaattccagtatacgtcccggaactttacttgaaacgcgatattcggtaacttcagcctgtccctgtataatttcaggacccttgcggagcatgaagaaaccgacgactgcaacgattgcaataactcccaacagagtaaggaatgcaagaagcatattgctgttttgtgattttataggtgccatatgatttatgaattatgatttatagattgtgagttggttagagattgggttgtttctgattgggttcttaactttatttttccgaatcttatttatttcagcgttcccaaagacttcttcagatagatttccgtcagcttcacatctatttgcgcgtcaatcttttctgaatgagcagacaaccatgctgtttgtgcttcaagaacattgctggtggcaatcactccttctttaaaaccaagtgttgcatagcgtagattttcttccgctttttccatgtttttagaagacattaccagtttcttaccagcttcttttaccttgaatgcagcctgattgacctgcaactctattttttcacgagcatcctgaagttggtactgtgcaatacgagcttcggcttttgccgctctggttttataaataccttctccccagtgccatataggtatctgtaccataactcccacattccacatacctttgaacttgttttcaaagctgttgaaaacagagggattggttaccatataattccccatcaatgcgatggatggaagatgctccgcacgggttacatttactttctgtttataaatctgcgttgccaattcgaggctacgtatctccggacgattctcataagcggtggatagatcgaaatgagggtccgttgtcagtaatggaatgtcttccatattttcgtctgccagtgtgatgggagaactaagatcaatgccacatagttgacacagcaacattcgcgcaagactcaatccgtcttccactttagtcagtgtcatttcggcttcatttaccttgacgcgtacagacaaaccatccgctttggtggctactccttcattaatcattttctctacatcgctgtccagctgttgcagaagctttagataaccttccgccaacttcttcttattaaccagtgaaatgacttgccaataggcttggtccgtactcatgattacttcctgcataccgccgtgatgttgttcttgagccaactcttcggcatactttgttattttgttgtacgcccggattttcccgcccatgtataaaggctgtgtcaatgtaatggcacctgcatagatatttcgggtgtctgtacggagtgcatccactaaagagtttcccgcttgatcgagggcgggcagcaccgctcctaattttccacttaaggaagaaataagtggtgccaagtcaggatgtgctgttgcaatctcggttgcagcttgttggatggggccagccagattcgttcctaaccctgaaagcgcggctttctggtcattgtttaataatgaaaactctttctggttcttcatgtaagctcccgttgccgagaaattaggcaaataatttgtaaatgcagctttccgttgataatgagccgcacttattttttcattgcttatcaacaaatctttgttgttggcaagagctagtgcgcggcaactatccagacttagaaagctctgcgcttttactgtaaaagtgaaacttaacagaaatgtcagaagaaaaacttttttcatcgcatcttgcatattaataaggtggtacttctattttaaataaccctgttcttatgcaatttgtttattaaagtagtctgtttttttgtacttgtttacttaaacaataattgcataaacaacgatgcaaatgtatgtgctttctgtgagaactcaaaacgaattagctttttttagaaatatagtggggatggattctgttgaaaagaaagaaggctattcctcatggcgaggaacagcctttcttgatatataaagtaaggggattttaattacagagcacctacttctttcaaagcagcgttagttccgtgaacagcttttgcgctagctgcgaacttagctttttcgtcttcgttcaggttcagttcaacgatcttttcgataccgttcttgccaaggattacaggaacaccgatgcaaagatctgattcgccgtattcaccttccaataatacagaacaaggaaccatcttcttttggtcgtgaaggatagattcaactacgaatgctcctgctgcacccggtgcataccatgcagaagtacctagcaatttagtcagcgtagcaccacctaccatagtagcagcagcaacttcttccaatttctctgcagagatgaaattagctacaggcatacctttgtaagtagcgaaacgagtcaaaggaatcatcgtagtatcaccgtgaccaccgataaccataccttctacttcgttagcgttgcaaccgatagcttgagacaagaaatatttgaaacgagagctatccagagcaccacccataccgatcacacggtttttcggcaagcccagagctttcaatgccaaataagtcattgtatccattgggttggagataacaacgatgatagcgttaggagaatatttcaacaggttttctgctaccgatttaacgataccagcgttcacaccgatcagttcttcacgagtcatacccggtttacgaggaatacctgaagtaatcacaacaacgtcagagttagcagtttgagcatagtcgttcgtgcagcctaccaatgtagtgtcgaaacccaacaattgagctgtctgcatcatatccattgctttaccttctgaaacgccttctttaacgtccagcattactacttcgtctgctacttcattaaaagcaagtacatttgcacatgtagcacctacgttacctgcgcctactacggttacttttgacataatactatatatttaaaaagttgataatttgttttatcttttagcgcgacaaaattacaacgataatcctgattaaagaaatttttccgtaataattttagttaaaggtcgaagttcccgataatatataggtatgataaaaagtttgggtggaagaagctgttttttgcatggttatatacagaatgtagctgcgtaagaatgtactattatggcaaatgattcattcagctatttttttataattgcttgcctattcggagttacttcgttagttactgttacttcgttccactatagtgttccgcaagaataactatagtgtcccttacggataactatagtggaacgcaagagtaactatagtagaacgaagtaataataagcaatgagattaataatattaggcagagaaagaaataacgatagtatcttgatggagaatttttggcaatacctttcaaccgtatgcttgattcatttttgtatggaaaaagaagataccaattaaagtggcagggaacctggcaagttttttaaataatgaacgaataaagtccgaaagcttattatctttgtgccaatctgttaattgaaagtttaatgaactgctgaaaatatcgaaaatatcaaaatgaagttctgggaatcaaatcatcaatctgttcaggaaggggatatgcaatttattgcactttacaaattctactatcaagatttgtatgcttatggagtgagtttggggttcaataccgaagatgtgaaagatgcaattcaagaagtatatctaaaattgtatttcaatgagcgcctgtgtattgatgagaagaaaataaaattttatttgttgcgttcggttaggaatcagctgattgattgggagcgtacaaagaaagatacatcttctatagaagaagaggaaaggagttttaaattatccgtatccgttgaagaaagctttatttctgatgaagaagacttattactgaaaaaaagggtgaatagaattcttgatttgctgacagatcatcagcgggaaatagtctatttacattttatagaggaaatgccttatgaagagattgcggtaatgctggatatgaaaattcaaacggtgcgcggacaagtctttaaagcgatggagaaattaagaaaactggattcaaaagattattttctgttttttcttatcttatacctgcatggcgtttctgtctttaaataattgaaaaagagtattgtatacggaaggcggggagcgtaaacctatacctctctgcttttttatttatttttttgaggaaaaaaggagatgaaaggcatacgaatctcgtatatatagtaaacaggtctttaattgaaataaatcatgaaagaatattcatcatatactacagctgattttttgaacgatgatttatttcttttctggtattattccggagaaggagattattatcgaaaaatcattgccgattgtcccgatcgtgagccgtatttaaaagaagcgatggagagactggcggcgttaaagtgggaaaagccggttttacccccaaaagaagtggataatgcttgtttgaaactggaacaagccattcaaaatcggaaaatgtctcaacgtaaacatcgattgtataagatgagatggtggagcgcttcagttgcggcagctattcttatcctgtttgtttcggtagaggttatttggaaaagtgctccggcaattgattatctagctttgttgcaagtgaatgactctgtgtttatgagtggtaaaacgcagctttttgttgacgatcagttgaaagaaacttttgaaggtaatccggatttggcttacgatcaaatggcgacagatgctggtgaaggggaatttaataaattagttgtttcgtatggcaaatgtgcccgtgtcactctttgcgatggtacgaaaatatgggcgaatgcaggaacggtgcttctatatccaacacattttgaggataagaagcgtgaaatatatgtagatggagaaatatatattgacgtgactcctaatccggagaaaccttttattattaagacgtcggatatgggagtaaaagtgttgggaacttctttcaatgtttcggcttatcgggaagatgtagagaaaagtgttgtgctggttacaggtaaagtggaggtaacagcatctaatggagaatctgtacgtattttacccaatgaccggttcaggcaatccactgataaatatgtggtagataaagtgaatgtggaggattatgtgtcgtggaaggagggacgattatcgtttaaaaacacagagcttggcggaatactcaaacaactgtccagatactataacgtaaggattgattatgataaacaacaacaacaaatcacttgtagcggaaaactgaatttggacgatacgatcgaacagatattgaatactatcacagaaacggctcctgtgataataagtaaggaaaacaatgtttataaagtaacaataaagaaaaaatagcctatgattaatatgtgaaaaaccatactctaatttatccttttgagagagaaaggataccagccagttttattcgtaatagaatagccttaaaatattgaagtataattttaattcttaaacagatgaatgaaaaacatcaaaaaaagaatcacacttgcctaagtgtgagaaggccctttatatgcttttttctagcattgggtgtgtttctgctatccgcttttcctactgaattgtatgcccagaagaaaacaattactttggactataaagagttgggactaatggaactttttaagaagatagaagaaaagagtgattatgtctttttctactatgacgtattgatagataaggatgtgaaggttcctgcacgtttcaaaaacatgacagtagagcaaattctggataaagtttttgctaacatggagcttgcctatagcattaataaaaaacagataactattaaaaagaaagtattgcaggaaaaaacgaagaaagaaggtcaaagctctattgtaaaaggagtggtattcgaccagtctcgtgaaccgttgcccggagttagtattgtagtgcaaggtactaatatcgggaccgtcagtgatcttaatggagcttattccattcatgtgccttcggatgattcgaagattattttctcctatataggtttcgctcctgtgacttattcggcaaaagaaatgaataagctgtcagaagtggtgttggttgaagatacaaaaacaattgatgaagtggttgtggtaggatatacgacccgtacacgtgagaaattaatcagttccgtctcgactataaacaatcaggaactagttaagtctacagtccccaatctggagaatgcgttgacagggcgtgtgtccggagtcttttcccgtcagactagtgctgaaccgggttcagatggtgccgatttgaaaattcgcggttttggttctgctttggtggtagtagatggtattccgggaagaaattacagtgatatcgatccttccgaaattgagtccgtttccgtattgaaagatgcatcggctgccgctgtttatgggatgcagggagcaaatggagttattcttgtaacgactaaaagaggaggaaaaaacaaaccgacgacattggatatcaatacgcgcttcggattgcaaatgcctcataactatccacagcctgcatcaaccccgctgtggcagacattagttggtgaatattatgctaatatgaaattgattaatgataagaacgcggtaattactcccgctgatatggctacacgtgactatgcttataataccaattggtatgaggaaatgataaagaacgctcccatcacccagtccaatatcaatatttcgggaggcacagataaaatcagttattttatttcagccggctatttatatcagggaggtatttggtcaacaaattctactgataagaatcgtttcaatttccgtagtaatttggatgcggatatactgaaaaacttgaagttatctgtcggagtgggagctgtcattaacagtctgaattatccgagatccgcttcgtatgagatagcccgcaaaatgaaagatatggctccgaatattccggtaaagtggccggggcatgacgactattatgcttttggtggggaaggtacggtgaatccgatggcattggcggataaagaggcatccggatattccaagaaaatagccaagaatctgaatgtggatttttctttagagtataaggttccctttgtagaggggctttctttgaaggctacgatgggatatacgcaatctgattcgtggaataagaactggaatatgaatatcgtttatatgggctatcgggaggatgcgcaggaatattatgagagtgcttccgcctctaatgccaataaagcaagtttgagtttggaagatggtttttcctataatataaccggacaaggttttatcaattatatccgttcgttcgggaatcataatataaacagcggactggtctttgaattttcggatgcggaaaaccgttctactgttacgtctcgtggagaatttccttctactgtgttggatatgatggcgggtggaattgccaataaacaagtgacaaatagtgaagttttccgtaaatacaggacggcttctttcatcggtcgtttctcttatgattaccgttccaagtattttgtcgatttcaactttcgatatgatggtgcccagtattttgccgataagtggggtttctttccctctgcctctgtaggatggatgctgacaaacgaagagtttatgaacccgttgaagaaagtcttgaatgagtttaaaattcgtgcctcctggggagaattgggtgacttgtcggctgccagtcaatattatgctaataatgagcaatactattttcaaagcggctatcaatatccgggtactccgatgaattttggtgaccgcaccatttatggattaaatcccaccttgaatcctaatccggattttacatgggctacctcgtcaatgataaatgcgggtgttgattttaagttgtggaatggcttgcttagcggatcggcagatgtgttctatcgtcagcgtaagggacttccggcacaaaaggccaatgataatgcaggagcattggctacttggtataacttagaccatgacaacacccgcggttttgagttctcattgaatcatcaatataaaataggagaagtcaactattttgtcggaggaaacatgtcgtggtccagaacccggaaagggaacattgagcacggaagatttacaagcggttatgacgaatggaaatggaacactgaaggacattggaataacgtacgttggggatataactgtattggacgttatcagtcgtatggagaaatagccaatgcacccatgcataataattcgaataataacagtgccatattgccgggtgacttaaagtatgaagactggaatggcgatggctatattgacaattatgatcaacgtcctatcggaagaaatgcttatccggagttggtatatggtattaatctgggactttcctggaagggagttgatttctccatgttctggcagggaggggcattgtcggacttccagatcggtgctttcgatatggatgctttccaggaaggagctactaacttgaacacttgggaatattttggcgatcgttggcatcgtgccgattatactgatccgaattctgaatggatacccgggtattttcctgcggtccgggattttacatcagtaacgatcaatcgtctaagttctaatttttggatgtggaatggaaattacatccgtctgaaaaatgtggaattgggatatactttgccacaacgaattacccagaaggctaatatcaaacagttgaggatttatgcgaatctttataactgcctgaccttctcctcacagaaattctttgatccggaacagcttgaaagtcagtattcgtttgccagctatccgcaaatcatgtcatttaatgtaggtataaatcttaaattctaacaggttatgaaagtaaaatctatcatatatatggtattggcattgagcttgtgctgtggatgtagcgattggcttactgtcgattcgaaaaccattcttagtgaagaggacattgccaaatatcccgaactggcagaagcacagttcttatccaattatgcggaattacgtaaatcaattcattgtatcggtgacggagcaatgtcgtataggcaacatcatctggatgcttttaccgatgatggagcgagcaatattacctacgagaatggggtcatgagaaataacactccgggtactgtttttggaggagtcttttctcaaagcaaaggtgaaatatttgaggcggtatggaattataagacaatcaatattgttaataagtttatcgccacttataagaattcggataatgaaggggtgttgagtacagtcggtgaggcttattttattcgtgcttatctgtattttgagatggtgaaacgatatgggggcgtgcctttgtattcaagtccgttggatgatgtaagctccatcaacaatcgttctacagaggaaaaatcctgggattatataaaagataacttggactcggctcttgtattgcttccgaaagtacagcgtattgcatcagaagatcgtgaccgtgccaatcggtatacagctttggcgttgaagtcgagggctatgttgtatgcggggactattgctaagtatggaaaagtttcaaataatagtttccagggaatccgcaaagaaatggcgaaaacatatttattggaagcggcaaaagcagcaaaggaaatcgttgatgatggtaagtatgcgctctctactgaatttggcgatttgtttaatggaaaagatgaaaataataatgagataattttccgttttgctaacgttgccaagacaggagtagctgtatatgaagattactggtaccaatcttatcgtatcaaacggtctagttattgtgcctttatggttcctcctttagatgttgtcgaacaatttgaaacattagacggtaagattcagccattggattatgccgcttcaaagaataatcccgaagatttttttgcaaatcgtgataaacgtctggatgccactgttatttatccgggaggagagttcttgggagaacgtttctctatttaccggaaaacactcgtaaaaaggacagatggaactactgaagaatattcttatgaaaaatctgaagattggatgggagcggggaaagtgcccggtcacgaaaaatacatgaaaagtggagcagatggtatcttcttgaacctttccgccgcaggaactactaactggggattttttctgaaaaaaacactgtatggagtgaagaggttggatgattatcttatacaagaaaacgatcaggatgctgtcgttattcggtatggcgaggttattttaaatttggctgaagctgccgttgagctttcaacctatggagtgaatgactatttagcggttgcccaagtcgcttttgacctattgcgtagtatacatggaggattgcctgccaaaacgatggacttggaggttgtacggcatgaacgccggatagacttgatgtatgaaggattccgttattgggacttgaagcgttggcgcattggggaagaaaagatgcacaataaaacgttgaaggctctctatcccattcttcatatcgatgaaacaacttctcctgcctccgtttattatacgttggagaaagtagaagcaccggatttggctacgagagtgaaatggttcgaggaaagagactattattgtccgcttcctttaagcaaaagcccgggtatcgtgcagaatgacggttggaattgataaccctaaaagaaaagaatatgaatagagctagattatatataaatatcaaactgttacttttagcagtgttaacactgaatctgtcagggtgtgaacttgacgaacgtgtggatgacttgaccggtggctacgaaggcgcttttattgacaggctgaccggtgaaaaggtggctaccgaatattatggagctaaattaaagttacttgatctggagtatggaaatgtagcggttcccttggagtataacacacttcctgaaggaacatatcgcaataccaaagtatatccttcccgctataaagtatgggcgaacggaccgttctttgagttggataccatttatggtgatattcgtagttttaagaaaatggacttgattgttacccccaacgtaacattgaaaattaagaaggtggaagtgttgtacggcattacagcgaacgtcacttttacttatcaggtaaatgacgaacgctccaagaatcaggaaataggattggtatatggcaaagagcaatatcccggacaacgtacggctatgaatgaaagcgaaagcggttcacatacttacaagcgaataaagaagaatttgacagaattgtcgggagaatttacggagactctgttcttaaaccctaacagcacatattatttaagagctttgggacgtacggaatcagcaggagattactggaattattcagaacagactgtgattaatacgacagatattgatttgtcttccttaccgattgaagccgctgtcggagtaagtagtgccacttctgctgttttgcagtgggcatttcctcccgttgttgacgagataaaggtttcttatacggatcgggatggtgaagaggtgatggataaatttaaacctacggattattcatacgttgccaatttacctcataatcaaaagagtacaatcaaagtacaacttctggcgaaaggagttgccggtccggaacaaacgattgaagtacagactaaatctttgacggataaatatgtacctgcctcaaacactcgtccggaaaatgttcctttctacaatgattcggaatttaaaaaatcattatcaggtgaatgggcattgatatatggtcctacaatcggcgaagactggtccactaccgatttacgttttgaatatttcgattggtgggatacatggttgataggatttgccgaccgtatgcctgcttgccaggatatagagaactttaaatcactgacgattcagggagaaatacaaacattggttgatattttaccttttgttaatctggaaacactttctatcataaagggtaaaggtttctcagtggataaaacgattaatccgaaagttgacctgacagttctgaagaaactgaagaaacttaacacagttattataggaccggatgtgccgcttactaaaaagaattttgatgatgcgggacttacacatctgacgattaccaactaggtcggtaatcacactactccctttgacaagcgaatgtgtctagtgggtaacatcggatacattcgttttttaaaagaaatatataaatgaaaatataaatagtatgtgtaagattaaatgtttatttctactgatgttgatcgtattgtgttcttcctgcaaagaaagtacagaagatgaaaaagcgatgcaacagatggtggaacgtttatttccggagtatgcttcccaatttagttttgaacaatcagaaaagattgataaagattggtatgaaatagaagcgcaaggaggaacagtacgaatacggggaaataacgcaaattcgatggctgtagggctgaactattatctgaatcattactgccttacctctgtttcctggtatgtgaacgatacggtggagatgccggaagtattacccatgccaccggcaaaaataatttcgactgcccgttgcaagaaccgattctttcttaattactgtaccttcggttatacaatgccatggtggacatggaaggattgggaacggttgatagactggatggctttaaatggaatcaatatgcctttggcaatcaccggacaagaatctgtctggtatcgcgtatggacgaaattaggattgacggatgaggaaatacggaactatttcacagggcctgctcacttgccttggcatcgtatgtctaacttggattattggcaggggcctctgcctaaagaatggctggatacacaagaagcattgcagaaacaaatcgtagcccgtgaacgtcaatttaatatgcgccccatacttcctgcatttgccggacatgtaccgtcggaacttaaaagaatctatccggaagctaagattagccggatgagctcttggggaggtttcgaggataaatacagaagccactttctggatccgcttgacccattgtttgcaaccatacagaaagagtttctggaagaacaaactaagttgttcggaacagaccatatttatggggcagatccttttaatgaagtagcccctccaagttgggagccggaatttttagccaattgctcgaagcatatttatcaatcgatgacgcatgtcgatccggatgctacttggttacaaatgacatggttattctatattgaccgacatttatggacaaacgaacgggtagaagctttcttgaaagcagtccctcaaaataaactgttgctactggactattattgtgagaatactgaagtttggaagcagacagatcggtatttcgggcaaccatatttatggtgctatttaggaaatttcggaggaaatacaatgcttgccggaaacaccaaagaagtggggaaacgaatcgaaaatgtatataccaatggtggagaaaacttttcgggactgggttctactttggaggggtttgatgtaaatcctttcatgtatgaatatgttttcagtaaagcatgggattgtaatctgccggactctgtatggatagaacaactggcagacaggcgaattggcttgagaaaccaacaaatgcgtcgggcatggaaattgctttatgacagtatttatacagcaccagctgctttgggacaggggacattgatgaatgcgcgtccttgtttaaaaggaaatggcaattggacgactacgcctacggtagcgtattccaatgaaactttgtttgaggtatgggagatgttgttgaaagccggagaacatcgacattctacttatgaatatgatgttgttaatataggaaggcaagtgctggggaattatttcgggaagcttcgcgatgaatttgcggaaacttattcccggaagcaattaccgctattaaaacaaaaaggagctgaaatgaaacaactactgcgtgatgttaatactttattaagtacacaatcttcttttttactgggaaaatggattgaagatgcccgttcattaggtatagacgaagcctctaaaaattattacgaagaaaatgcccgtactatcgtttcaacctggggagataaagatcaaagtttaaacgattatgcaaatcgtacttggggaggtttggtatcgggatattatgcgcctcgttgggaaatgtttatagatgaagttattcgctctgtttctaacaagcagccgtttaatgctgatgcttttcatcaaagagtgacgcagtttgaaattgactgggtcaagtcacatgaacgttatccttccgaaccggttggtaatgctgttgagattgctactttattgatgaataaatacaaggattcaattttaaaagaaaaacacaatgagaataattagttatatttcaagtataatcatcactttttttgcattggctattatgagcggatgcaaagattcggaagttgttgatgacggctttcgtacaacaatggctaaagcctctgatgtgaaattaaataaagttgcctattggccgggagatcctgtaaattgctcttttaccttgaaaaatgaaacgaactatccgatggatattcgtgaagtaaaagtggtgattcagaacttggatgatggagggtgtgtattgatagaaaagtctgttgcttcccatattcaaatagaaccgggacaatctgttcctgtggatgccgggacactgtatacccttccagctgcattaaagccttcttccttttgtgctgtcaggttcctgttagattttgaagatgggataaccactacaattgacggaacatatttcagagctgtcaacgagcagtcgctgttgacttacgatattcaaaagttagattatcagggacttcctgtttatcgtcagataggagatatgagtgccgggttcggtgtattaaaaacgatagttgctttcgaccagggaatagctgccaccatggaggaggctccgcagggtggtacttatccggttgcgcctactccggagtttttgcaacgttccgttcgcaaaactgttgagctttacaattcggagatcggagctgccacaaagataaagagagtggtggttggaacggggatcgcatctgtttcttactttgcaacaatgatgggggcagcctatttacctattcattatctggtatcggctaattctgcttccgaagtacaagctatactcgattattccaatcaaaatggatatgcctcttatgccacattgggttatgacggttctatgcctggagtgggagttgcctggataaaattattggatttgccggaagaatataagcaatttataaaagaccatcaggtggaagaagtttatatttatggagtaggtcaggaaggacatggagagtcttattcccgaagggttttgacgcagaatacaattaccgatgaatatgcacctggttctttatatatattgtatactaactttggttcggatgccgatattgacgcactgaaacatcggttgtatgactataatcagttaaaattgggtgaaggacagtatatatctgattgggaaagcggaattgttgatgatcagataaccaatatatccggctctgcgcaagcgatggcaaatgtgaaagcttatacgattgagactgatgatatgatggctttgtacaatatatcttctttcctgacgcttcaatatataaaaaagaatcaaagcaagttgcaggcaccttttgtgaatggagttatttttaacgagtatcttacgaatcaccctcaatatgaagcgtttgttggatatgtacctttattatattggcaatttaattcggcggcttctacagtagaacgtattgatggttatctgaagccagctattgccgggtattttcctgatgttgtcgatcatctgtatgagggatctttctatctgaattctaatatgagacgctatgagttttatgacgagctgatagcaagaggtgtcacttcggagaatattagaattaggcagagtgtagataaatggaatccggaagatgatggagaaacggaagagtatttgggacgcattaatcataaaataggttcggctgaagaatttgcttatgatataattgaacgtattggagtgcagaagtatcggaatacggttaagtcgatggagtacctgacattggaggagcttcgtactatttgtgcacaggttggaaatatgagattagtagaacattgatataacatcggatttaagatttaaactaacgaaatgaatataaaacaattgatggtaactttcttcattgcactattggtaggaggagagattggagctcgtgtgctgacggataaattcgtttattcacaaggggagaaggttgtgtttacttttgatgggaagtcagaaggtaaaacgattatactgaaatatctctccaagaaaggagaaccggttcttgcggagattggtggagaaccatttgtttgggaagttccttcagaatttacgcctgcagccgtaggtgtttatcaaaaagaggagggacagttgacatattcttcttattttagggtggtaattcccggaatgttgactacctatcagatcgctaaagaggaatataaaggtttgaatgtgtttatgctcgatggtgggatgagtgcggaatatgctgtccaaaaatctttagctaatctgacggcaggtgtgagccatacatggcagattggtccgggaggaggtcccaaaccggtatgggggacacctgatttccttcaacaatccgttcagcatacagtagatttatataatgagtatttgggtaagtcgaagaaacttaaaactgtgataatagctacgggagtaccgacggtaccttatctttctgcagctatggaggctcctgtattgccattacattttttggtttctgtcaattctaccaaagaaatttcttccatattagaatattcctcgcaagctggagtaccttgttatgcgacattgggatatgatgcttccatggatgatgtcggagttgcctggataaaattattggctttgcctgatgaatatcggaagtttataatagaacatgaagtagaaaatgtaattatcgcaggcataggggaagacgtgaaaagtgaatcttattgtcggaaacttagtaaaaccggagtggatggtcaggagtatgcagacggctctctttatattttatatacccaatccggttcagagcatgacatcaaaacgatatcaagaaatgtcgtggactatgatacgttatctcttgaaaaaggtaaggacttggccgattgggagagcggtgttgtcaacaggcagattgataatatatcaaaaggtatttatgaacatactccggcacaagtttattctttgattgctactcatgatatgatggatatgtataatctcggtgcaaatatgggtatgtattttatgtataagaatcgggagcaaacaaaggtttccgtacaggggacttatttaaatgaatatttaatatcacaacctttgtatgagttgactcaaggatatattccattattgttttggcagtttgttcctcctgtatcaacgatcgacaggataaaacgtgatatacagaaagtggtggatacttatgaaaaaggtgttctcttggagaataaaaccgtacatgtgaatgcacgtatcgggaaagaagagttggtacaggaattgaagaaaaggggatttcggtttgttactaagcgcaaagataaggtggaagaattgtggaacttatccgatgggataaattctccttgtgaagaagtcgtgcagaatatagtagaacagattggagttcggagatataaggaattgtgcgaaaatgctttatatttggatttggatgatctcaagcaattggtagaagatgtgcagggattaatctttcagtctctttgataaaaggatggggggaatgtgtgattcaatctctatagactttattatgtctcttaacttgactgggttgataaactaattagttaaaattatatggattagcagggagttataaaaaaactctctgcttttctgcttgacttctgttgcgaaatgattacttttgcgcacgttatcaattcacaactgaaactatgagtaaaaaaagccttcttattgcggccgtggctatcttggtgatagctattattggtattacttatttattgtttaccgaaaaacaagctaaccgggagttagtgcaggaattccaattagataaggaagatctggaaaacgaatatacccgttttgcacaacaatatgatgagttaaagatgacgatttctaatgactctttatctcaattactggaacaggaacaattgaaaactcaacgtctcttggaagaacttcgtacagtgaagagcacgaatgctacagagatccgtcgtttaaagaatgagttggctactttgcgtaaggtaatgattgggtatattaatcagatcgactctctgaataaactgactgcacagcagaaacaggtcatagctgaagtgactcaaaagtataatcaggcttcacgacagatcgataacctttctgaagaaaagaagaatctgaataagaaggtgacgctagccgcacaactcgatgcaactaatattcgtatcgaaccacgcaataaacgtggtaaagtggcgaagaaagtgaaagacgtggtgaagttagccatcagtttcacggtcgtgaagaatataaccgccgaaaacggtgaacgtaccatctatgtacgtataaccaaacccgataatgatgtactgaccaagagtgcatccaatactttcccttatgaaaaccgtacattggtttattcaattaagaagtatattgaatataacggagaagaacagaatatcaatgtgttttgggatgtagaagaattcttgtatgccggaaactaccgtgttgatatcttcgaaggtggtaatctgattggttcgcagacctttatgttagattaatatcggggtattctttttctctaccgatattctattttcttctatattagctaacccgatggtctgtttttaatatttcttcgggcaacagttgttcttttatggatgaactggggaaagaactgcataaataattgcaataatatacagaaaatagggcgagcgtagcatgaatttgcagacaatatgcggctttttaatcatgggagccttcgttggattaaaaccaacgagatgtccctcaccgaggaaggataagttcctcggtgagggacatctcatttctcggcgaggaactcatataggaatgattagaagctatttttttctctagtttatatataaataaaggtaaggagaaactgataaaatgaatgactgttgtctataaaagaatgatttgcaagtgtaatcagtatattttaatcttattgagtaaatataggggaaaataatgttaatctgatttctgaagattgtaaatcccagccctttttgtctttagttggaatctatacccaaaattgttgcattctcaccagtttgaatatccctttttttagaagttctatttttaagtaccgtatagttgaattaggcgatgaggaataacggtgcataatgtgaactgcttaccgtcttccgtcagctccccacatcatcttgctgcggagtgtatcgaaaaaaatgtgattaaaacgtttcactacctttacgctgtaatctgcccggcgaatggttagttgagtcgtttctttgcaagtttcgctcctcccgtcaatggcgacgaggaagttgtgacttctgctttctacatctaatgtaatctcccagtcatcccgaataacgatagggcggacgttgagactatgtggagccaccggagtgatggcaatagtgttggaatgaggaacgatgatcgggcctcctacactcaaagagtaggctgtggaacctgttggagtggcaattactaacccgtcagcttgataagtattcagatacgcgccattaatagctgtccggatactaatcatagaggagctgtcccgtttgagaatagctatttcgttgagggcataaggagaatcttggagatgtttgtcgttgcagattaactgaagtacgctccgttcctccacactatatctgccgttttggatttcatcaaatgtttcctccatttcttccggtgaaatatctgccagaaatcctaaacgtcctgtgttaattcccaaaatagggatcccttttcttcctacgcggcgggcagctttcagaaacgttccgtcgcctccgatgctgattaccatatcggcagtaaaatcatcaccatcaaataattgatctgcttcaatatccatattttcagaaactaggaattgataaaattccctgcacataccaatctctgctccttgtttctttaaaagtttaaacaaggtgacagcatgagaagactttttagcctgataagtatttccaaaaatggcaaatttcataagcaacatcattagttcaggatgcaaatttggcattttttcttggatttctactttaaataaccaaaaaagagtagagaatgcgtttcgtattattaggcaactaataataatatttgtatttttgcggcaaatataacgtagaactatgactaaattaagtgtaaacataaacaagattgctacactaagaaatgctcgcggaggaaatgtccccgatgtaataaaggtagcgcttgattgtgaatcttttggggctgatggtatcaccgttcatccccgtcctgacgagcgtcacattcgtcgttctgatgtatatgatttgcgtcctctgttgcggactgaatttaatattgaaggttatccgtctccggaatttattgacttggtgttgaaagtaaaacctcatcaggttactttagtacccgatgatccttcacagatcacctccaattcaggttgggatacgaaagcaaatcaggaattcctgacggaagttctcgatcagtttaacagtgccggcattcgtacttccgtttttgtggcagccgatcctgaaatggtggaatatgcggcaaaagcaggggcggatcgcgtcgaactgtatactgaaccttatgcgacggactatccgaagaatccggaagcagctatcgctccttttatcgaagctgcaaagactgcccgtaaactgggtatcggattgaacgccggtcatgatttaagtctggtgaatttaaattatttctataaaaacattccttgggtggatgaagtgtctatcggacatgcgttgattagcgatgcactgtatctgggactcgaacgtaccattcaggaatataaaaactgtttacgctcatgaatgcaatgatcttgttagcccaaggggctatgaatatggccgactcactggctactgccaaccccgtgctgacggaggtaaacgctccggaaatgaacatgcttgatatggctgtcaagggtggatggattatgattgtattgggcgtactgtcggttatctgtttctatatcctgtttgaacgtaactacatgattcgcaaagcaggaaaagaggaccccatgtttatggaacggattaaagactatattcatagtggagagatcaaagcggctattaactattgccgtacgatgaataccccttcggcacgtatgatagaaaaaggaatcagccgtctgggacgtcctattaacgatgtgcaggtagctattgagaatgtgggtaacattgaagttgcaaagttggaaaaaggactaactgtgatggcaactatttccggaggtgctccaatgctcgggtttctcggtacggtgaccggtatggtacgcgcattctacgaaatggcgaatgccggaagtggaaacattgatatcactttgctttcgggaggtatctatgaagctatgattacaacggtcggtggtctgattgtcggtatcatcgctatgtttgcctataattatctggtgatgctggtagaccgtgtggtaaataaaatggaatctcgtacaatggagttcatggacctgttgaacgagcctgcaaaataattggcagatgggattaaaaagaagaaatagagtatcgcccaatttcagcatggcctccatgacggacgtcatcttcctgctgctgatattctttatgataacctctacggtggtgtcgcccaatgccataaaggtattgttgcctcaaggcaagcagcagacttcggccaagccgctgacaagagtggttatcgataaggacttgaatttctatgccgctttcggcaatgaaaaagagcagccggtggcgctgaacgatctgacttcatttttgcagagttgtgcagagaaggaaccggaaatgtatgtggcattgtatgcagatgaatcggtaccttatcgtgagattgtaagggtattgaacattgcaaacgagaatcattttaagatggtgctggctacccgcccgcctgaaaataaataagaaacaatggacagaagaaaaaagggtgaatacataggagcgctcggtgcactgttggtgcatgtggcagtgattgctcttttgattctggtgagctttactgtcccccaaccggatgaagatgcaggcggagtgcctgtgatgctggggaatgtggatacagcgagcggctttgatgatccttctctggtagatgtggatattatggatgaagatgcggcagcaccgcctgcggaaacagaaccgcaactcccttctgaacaggatttactgacacagactgaagaggaaacggtcactttgaagcctaagacggaagaaccgaaaaaagagacggtgaaacctaaagaggtggtcaagccgaaagaaccggtgaagaagccggaaaaaacggaagcggaaaaagctgcagaagcgaaacgactggcagaagaaaaagcggaacgtgaacgtaaggctgccgaagaagctgccagaaagagggtgtccggtgcgtttggaaaaggagcgcaaatgacaggaaataaaggaacagcggctagtggcacgggaaccgaaggtagcaaggagggtaactcttctaccggagcgaagaccggaaccggaggttatggaacatttgaccttggcggacgttctttaggtacgggcagtttgccgaagcctgtatataatgtgcaggaagaaggacgtgtagtggtgaatatcaccgtgaatcctgcagggcaagtgatatcgaccagcattagccctcaaacgaacactgtaaattccgctttgcgtaaggcggcggaggatgcagctaagaaagcccgttttaatacgatcgatggagtgaataaccagacagggacaatcacctattattttaacttgagatagtatcattaaccaaatatattaagcattatgggaactgtatacgctttttttgcagatggttttgaagaaattgaagcctttactgctattgacacgttgagacgtgccggactgaatgtagaaatcgtatccgttacaccggatgaaattgtagtaggagcacatgatgtatccgttctttgcgatattaatttcgagaattgtgatttctttgatgctgaacttttgttgttgccgggaggaatgccgggagctgctacacttgacaagcacgaaggattgcgcaaattgatccttgattttgctgcaaaaggtaaacctattgctgccatttgtgctgctccgatggtgttgggtaaactgggactgctgaaaggaaagaaggctacctgttatccgagtttcgaacaatatctggatggtgccgaatgtgtaaatgcacatgtcgtacgtgatggaaacatcattacgggtatgggaccaggtgctgctatggaatttgccttgacaatcgttgacctgttggtaggtaaagaaaaagtagacgaactggtagaagcgatgtgcgttaaacgctaaaccgtccatgaagaaatatgtaatcattgtcgccggtggaaagggcttgcgaatgggaagtgatcttcccaaacaattccttcccatgggtgataaacctgtgttgatgcataccctggaagtcttcaggagatatgacgaggcacttcaaatcatattggtgcttccgcaggagcaacaaagtttctggaagcaactttgcgatgaacatcattttacggtaaaacatgtccttgcagaaggaggtgaaacacgtttccattccgtaaagaacgggctggcactggtgcaagagccgggattggtgggagtgcatgatggagtacgcccgtttgtatcagtagaagtgattcgccgttgttatgagttggcagaggtgcaaaaagcagtgattcctgtggtggatgtagtagagacgcttcgccatttgacagatgccggaagtgaaacagtcagccggattgattataaactggtgcaaacgccgcaagtgtttgatgtagagttgctgcaacaagcctatgcccaggaatttacccccttctttacagatgatgcttccgttgtggaagcgatgggaatgcccgtttatctggcagaaggcaaccgtgaaaatataaaaataacaactcctttcgatttaaaagtagggagtgctcttttataaatgttcgatttagccacacgcgacataaaatttatctccggtgtaggccctcaaaaagccgctgtattaaataaggagttggaaatctattccttgcacgatttaatttattatttcccttataaatatattgaccggagccgcatctattacattcatgaaatagatggcaatatgccgtatatccagttgaaaggagaaatcctcggtttcgagaccattggtgaaggacggcagcgccgtttgacagcgcatttttcggatggtacaggagtcgtggatttggtgtggtttcaaggtataaagtacatcttgggaaagtataaacttcacgaggaatatattattttcggcaaacctactgttttcaacggacgtatcaatgtggcgcatcctgatgtagacaaaccggatgatttgaaactttcctcggtggggctgcaaccttattatagtacgacggagaagatgaaacgcagtttcctcaactctcacgcgattgagaagatgatggcaacggtgattcagcagatacaggagcctctacctgaaacactttctcccaagttgctgacggagcatcatttgatgcctttgacggaagcgctccggaatatccacttcccaaccaatcctgacgtcctccgtcgggcacaataccgtcttaaatttgaagaactgttttatgttcagttaaacattctccgatatgccaaagacaggcagaaaaggtatcgtggatacatctttgaaaaagtgggagatgtgttcaatacattttatacaaagaatcttcctttccaactgacgggtgcgcagaaacgggtgttgaaagagatacggaacgatgtcggcagtggcagacagatgaatcgccttttgcagggagatgtaggaagcggaaaaacactggttgccttgatgagtatgttgctggcattggataatggctatcaggcttgtatgatggcacctaccgaaatcctggcaaaccagcactacgaaaccatcaaggaactgctttttggcatggacattcgtgttgagctactgacaggttcgattaaaggaaaaaggagagaagcgattctgacaggattgttgaccggagatgtgaagatattaataggcacacatgccgttattgaagatactgtcaatttctcttctttaggcttcgttgtgattgacgaacaacatcgttttggcgtggctcaacgtgcccgtctttggagtaagaatgttcaacctccgcatgtacttgtaatgactgccactcccattccccgtacgttggcgatgactttgtacggtgacttggacgtgtctgttatcgatgaacttccacccggaagaaaaccgattactaccatccatcaattcgacaatcgccgggaaagcatgtatcgttcggtacgtaagcagatcgacgaaggacgccaggtttatattgtctatccgctgattaaagagagcgaaaagattgatttgaagaatcttgaagaagggtatcagcatattctggaagagtttccgaagtgtacggtttgtaaagtgcatggcaaaatgaaacctgccgagaaagatgaacaaatgcagctttttgtctcggggaaagcgcagatcatggtggctactaccgtcattgaagtgggagtgaatgttccgaatgcttcggtgatgattattgaaaatgcagaacgtttcgggttatcacagttacatcagttgcgcggtcgagtagggcgtggagcagaacagtcttattgtattctggtgacgaattacaagttgacggaggatacccggaaacgattggaaatcatggtgcgcaccaatgatggttttgaaatagcggaggccgatttgaaactgcgtggtcccggtgatcttgaaggtacacagcaaagcggtatcgctttcgatttgaagatcgcggatattgtccgcgacggtcaactgttgcaatacgttcgtgctatagctgaaagtattgtagaacaagaccctgcagcacaaagtccggagaacgaaatcttatggcgacagcttaaagccttacggaaaacgaatgttaactgggctgccataagctgaaaaacggttaaacatgcagtttatttgcgtaaatgtgttgcaaaacatatttcggctctattctccctatttataggagtttaacgacctgattcctcttccttttcgttctaagcttctgaaaaatagttaataacttccttgccatttcgtaggaaaacactatctttggaagaatttttttagtaaatgtattgtttaaccatttgcaaagtcgagtattatgcttgaaaaaacgctggtcattttaaaaccgtgtacccttcaacggggattggttggtgagattactcatcgctttgagcgtaaaggattacggttggctggcatgaagatgatgcaactgactgatgaattgttgagcgaacattatgcccaccttagcggcaaatccttctttcagcgtgtgaaagattcgatgatgacagctcctgtcattgtttgttgtttcgaaggtgtggatgctattcaaacagtccgtacgttggcgggaccaactaatggacgtctggctgccccgggtaccattcgtggggattacagcatgagctttcaggaaaatatagttcatgcttctgattctccggagactgcggctattgaattaaagagattttttaaaccggaagaaatattcgattacaagcaggcgacatttaactacctgtatgcaaatgacgaatattaaatagaattgataaaaaaggaatgaatttcaattgcattattaaaacaggattggtcgctgttgcggctatggtcagcttgagctctttctcacaagacctgattgcccgccaggcaccgatagacaaaaaattaaaatcagtagattctttggcattgcagaagcaaatccgtgccgaacaatccgaatatcccgctttaagtctttatccgaattggaataatcaatatgcgcattcttatggaaatgcgattattccggaaacatatacaattgacctgacgggttttcgtatgccgactccgagtacaaaaataacttcgccttttggcccgcgttggagaagaatgcataatggccttgatttaaaagttaatatcggtgatacgattgtttctgcttttgatggtaaggtacgtattgtgaaatatgaacgcagagggtacggtaaatatgtagtcattcgtcacgataatggattggaaactatatatggacacttgtctaagcagttggttgaagaaaatcagttggtaaaagctggtgaaccgatcgggttgggtggtaacaccggacgttctacaggttcgcatcttcatttcgaaacccgcttcctgggaattgcaattaatccgatttatatgtttgactttccaaaacaggatatcgtttccgatacttatacgttccgcaaaacaaaaggtgtgaaacgtgcaggctctcatgatacccaagtggctgacggtactatccgttatcataaggtgaagagtggcgatacattgtcccgcattgctaaattgcgtggcgtatcagtcagcacgctttgcaaactgaaccgtatcaaaccgaccactactttgcgtatcggacaggttttgcgttgttcataaaaaatatagcttataaaacagtaatacaatatctttaggagagggcactttaatataatttagagtgccctctttctgtttttacttaattattgttacctttgcgcactatttggaagaagatgaaagataccaagcaacaatttgaacatgtcatcgctttgtgccgtgacttattttccaagaagctgcacgattacgggcctgcatggcgtatcctgcgtccggcttcggtgactgaccagatttttattaaagccaatcggattcgtagtattgaaaccaaaggagtgaccttgattgatgagggaatccgtgctgaatttattgcgattgtcaattatggcattgtcgggctcatccagttggaactgggttatgccgagtctgccgacatcagcaatgaagaagcgatggctttatacgataagtatgcaaaagaggcattagacctgatgcttgccaaaaaccatgattatgatgaagcctggcggagcatgcgtgtcagctcttacacagacttgatcttgatgaagatttaccgtaccaagcagattgagagcctggccggcaacacattggtgtcagagggaattgatgccaattatatggatatgattaattactctgttttcggactgattaagatagaatttgaaggataagaacttacatatcattcaggaggtagtggcgaatacgtgtcgctttcttttggcggcatcgttcatcttttccggatttgtaaaggcagttgatccactggggttccagtataagatccaggattatctgaccgcattcggaatggcttcctggttcccttcattcttccctttattgggaggcatcatcttgtcagccgttgagttttttatcggtatctccttattttttgctaccagaagaccattggctacttcgttggctttgatgctgatgattttcatgacaccactgaccttgtatcttgccatctttgatccggtttcggactgtggctgttttggagatgcctgggtgttgacgaactgggagacattcggtaagaatatagttctgctgtttgcagcaatgatggctttccgtcacagaaggatgctggttcgttttatcagtgtgaaaatggagtggctagtttctctctatacgttgttctttgtatttactttgtcgttctattgtctggaccgtctgcctgttttagactttcgtccttacaagatcggaaagaatattctggaaggaatgacaatgcccgaaggagcgaaaccgagtgtatatgaaagcatctttattctggaaaagaacggagagaagaaagaatttacgttggataactatccggatagtacctggacatttgtcgacacacggacaatcctgaaggaaaaaggatatgaaccggctattcacgatttctctatgattgatctgaatacgggcgaagatataacagacgatgtattgacggatataggatacaccttcctgttggttgcccatcggattgaagaggcggatgatagtaacattgatttgattaatgagatatatgactattcggtggagcatggctataagttttattgcctcacttcttcaccggaagaacagatcgaattgtggaaggacaagacgggagccgaatatcctttctgtcagatggatgatattacattaaagacgatggttcgttccaatccgggattgatactgattaagaacggaacaattttgaataaatggagcgatgaggatataccggatgaatatgtgctgacggacaaactggaaaatctgccgttaggaaagcagaaggtgagcagtgacactcatacggtaggatatgtattcttatggtttgttattccattgttgttagtgcttggggtggatgttttggtcgttcgccgcagagaacggaaaaacgcgaagcggaagcaacaagaggaagagatgaaaagcaaagaattaaaaacggagaatccgaaaatagaagaacaagaataaaaaaaataaatgataacgagcggcctctgtaacgaacgctaattccgatcgttcaattgtcaatcgtgaaatcgtaaatttattaaccctttaaaataaaaaacaaaatgagaaagaacattgttgcaggaaactggaaaatgaacaaaacccttcaagagggtatcgctttggctaaagaattgaacgaagcattggctaacgaaaagcctaactgtgatgtaatcatctgtactccgtttatccacctggcttctgttactccgttggtagacgctgcaaagatcggtgtaggtgctgaaaactgtgcagacaaagcttcaggtgcatatacaggtgaagtttcagctgaaatggttgcttctacaggtgcaaaatatgtaattctgggacactctgaacgtcgtgcatactacggtgaaacagttgctatcctggaagaaaaagtaaaattggctttggctaacggtctgactccgattttctgtatcggtgaagtgttggaagaacgcgaagctaacaagcagaacgaagtggtagctgcacagatggaatctgtattctctctgtctgctgaagacttctctaagattgtattggcttacgaaccggtttgggctatcggtacaggtaaaactgcttctcctgaacaagcacaggaaatccatgctttcatccgttctatcgtagctaacaagtatggtaaagaaatcgcagacaatacttctatcctttacggtggtagttgcaaaccttctaacgctaaagaactgttcgctaacccggacgttgatggtggtttgattggtggtgctgctttgaaagtatctgatttcaaaggtatcattgatgccttcaattaaatgatagttgataaatgatagttgataaatgatagttgatagttgctatgtactatagcctgctatcgactatcgtttatcttttcaactatcattttccgactgtcattctctaactgtcatttatcatttatcaacaatcaactgtttaataatgaaagttttacttaccctattgtttgttttgacagctacttttgcgcaagcgcaaagtattatcaagagtctggaacgtaacattccggggcaaggaaaggtgactatccatcaagatccccgcatcgaggctctgataggtatggaacgtcctgcaacaggtgaacagaaagtaataaagacttccggattcagaatccaggcgtatgccggtaacaatactcgtcaggcgaagaatgatgcttatcatgtagcatcgcgtgtgaaagagtattttcctgaattgacggtatatacttcgttcaatccgcctcgttggctttgtcgtgtaggtgatttccgtagcattgaagaagcggacgcaatgatgcgtcggttgaaagctaccggtgtgtttaaagaggtttctattgtaagagaccagatcaatattcctttataattgtatcatgttagaaaaagaagaaattgtttctccgaatctggaggagttaaagagtcattatcgtagtattataactttgttgggtgaagatgccgaaagggaagggttattgaaaactccggaacgggtggctaaggcgatgttaagcttgacgaaagggtatcacatggaccctcacgaagtgcttcgctccgctaaattccaggaagaatatagccagatggtgattgtgaaagatatcgatttcttctctctttgcgaacatcacatgttgccgttctacggaaaggcgcacgtggcttatattcctaatggctatatcacagggttgagtaagattgcccgtgtagtcgatatattctctcatcgtctgcaagtgcaggaacgcatgacactgcaaatcaaagagtgcattcaggaaacgctgaatccactgggagtaatggtggtggtggaagccaaacacatgtgtatgcagatgcgtggggtagaaaaacaaaactctattactactacttctgactttaccggagctttcaatcaggcaaagactcgtgaagagtttatgaatctgattcaacacggaagagtataatctattttctgctcactaaacaaataagtttatcgtaaaacgacgcgatctcccaaccgctttgccatgatgctttgtacggttctcaactcattatagcgttgcataagtgagtcgcatttctcattatcatgggcaagagcaggatcttggagagcataaagcatgtgcttcaattcctctgttacgattgcatacttgaagttaatcattaacatcggaaccatttcatagagccgctcttcatccgtcacaatcttttgggacttggagtgatacttactaagctgataacgcacattaatcaagtctacactcaatttactgattaccggatcaggatgtgccaggaaataacgttcggcaatgaagttggaatcgtgcatgtgtgcagcagcttccgataacatttggcggtgcagcggattatggaaggctaactcgtcctctttcaaatcattaaccacatattctatgacggttaccggaatttcgtttccttcttcatcagtcaggttacacatgattttctctccataacgaactaccgcctgtaatatcagtcgctcgaatttgtagaattcctgcccttcctttccttcctgcggaataaaggaagcataactgtcttcctgcagagcaggaggaacatctgtatatccgccatccacttcaggaggtaacggaatatctccattaggtattggaacatcttcaggaggtgtgctgccctgtgacatcatagccgttctttcagccatccggcgttcccgttccgtttgttcagctcgcttctctgcttgagtttcccgtcttttggcaacttctgatactagcagtttatcttctacatgaagtagctgcgcgcattctttgatatagacgtctctgacaattgcttcagggatgacagaaatactttgcaccagattaccaatcagttccgcacgcttgatggggtcttttcccgcatcttccagtagcaagttcgttttgaagcggataaagtccgtttcatgttccgagataaaagtctgaaattccgttgagttgtgcttgcgggcaaaagagtccgggtcgtccccatcgggaagaagacagactttgatattcataccttcctccaataacatgtcaattccccggatagaagccttgatacctgctgcgtcgccgtcgtaaagcacagtcatgttgttggtgaaccggtgaatcatacggatttgtcccggtgtaagggctgttcccgaggaagcaaccacattctctatgccggattgatgcatggagattacgtccgtgtagccttcaaccaaaaagcaacggtcttgttttacaatagcctgtttggcaaaatatataccgtataactcgttacttttgtggtaaatttccgattcgggcgaattgacgtatttgactttaacccctttcgttgcactggcaagtacacgtccgccaaaagccaccactttgccggaaagcgtatgtacagggaaaataacacgtccccaaaaacgatcccgtaaccggtggtcgtccgtttcgtagcaaagtcctgtttttaccaagtactctttcttatatcctttttggattgcttctttggcgaatgcatcgtgggcttcagtgcagtaacctaattggaatttctcaatgatgtcgtcgcgaaagccacggttgcggaaataggccataccgatgctacgcccgtctacatgattttttagtatgttctggaaatagtcgcgtgcaaagttattaacgataaacagactttcgcgttcgctttgcacaaacttctcttcatcgcttaattcccgctccttgatttcaatattatatttcttggcaaggtacttcaatgcttccggataagacatctgctcgtgttccataatgaaatgcacggcatttccaccttttccacaagcaaaacatttgcataatcctttggcgggagagacataaaaagaaggggttttatcactgtggaacggacataaaccgacataattgacaccacgtttgcgcagggtgacaaaatccgaaacgacatccataatttgtgccgcgtccaatatccggtctatggtaatttgatctatcattctttctcctgtgaatccgtttttgcggatacaaaggtacacataaaaaaatcccctgcaaagaacttttttgcaggggatcgttaaatcttggcaccggtattgattatttaatcttttcccggatcttcgtcagatactttttcataccttccgcatccttgttttcgattatttcgagaaggtttttcaactctgtccggatattagtcacttgtcccggagtgcgtgggttgaacagtatttcctgaagcaggtaatcatcttcgcttagcagccctttggcgattgccatgtgctttttgaacgtagttcccggggcttcctgatgtttcattacggcagcaaatacgaacgtcgatacgaacggaatagaaagcgagtaggctactgtttcgtcgtgctcatcaaatgtatattcgaagatgttcaaccgtaatgtctggtagaggtctttgaagaatatttttcccaggtggtcgccttcactgatgatgatggcattttcgctgcttagattgctaagacttgcgaaagtcgggccaaacatagggtgactggaaacgtagcggaaaccactttcttcgtagaacttcttcaatcctgtttttacagaggcaatgtcactaatgatacagtctttcggtaatacaggcagtattttgcgaaaggcatccaacgtgtacttcactgtaacagcattaataaccagttccggttcaaattccttaatctcctccaatgtagtgaaacgatacgtgttatagacgaaacgcaactggtgcgggttgacgtcgaacacggccgtctcgtgttgaaagctcaaaatatcagtaaagaaggagcccattttaccggctccaaggattaatattctcataatgtttattatttagtgagagtgtgtcaaaacacaaattatcgcagattatttcaactatattgatatattaatcaacgacttataaaattatttctgcgataatttgcgttaatctgcgttttattattcattatgacacaccttcactctaactacttattaataatttccatctgttgacgaactgattcttcgtggatggcttcgaaaatcttcttcataaactcgctgtccataccgcattgttcgccctgcgcgccacgtttttccagaatctcattgtaacgtccggcttgaagaactgtgattccgtgctcctttttgtaagtaccgatttcacgggccacacgcattctttttgctaattcctgaatgatattgtcgtcacattcatcaatctgtttacggagttgtgccagactttcggtagactgtgtttccgtacggattaccaacagattgaggatatagtcgagtacgtccggagtaacttgttgagaagcatcgctccatgcgcaatccgggttgcagtggctttctacaatcagaccgtcgaaattcaagtccatagcctgttggcaaagcggtgcaaccaactcacgttttccaccgatatggctcggatcacagaaaatcggaagattagggatgcggcggcgcagttcgataggaatatgccattggggaagattccgatagatctttttgtcataactgctgaaacctcggtggatagcacccagacgcttcaaaccagcgttgttgatacgttccagtgctccgatccataattcgagatccgggttcaccgggttcttaaccaatacagggatatcaacccctttcagtgcgtcagcgatttcctgtacggcgaaaggattagcagtggtgcgtgcacctacccaaagaatatcgattcccgctttcagacattcgtaaacgtgtttggctgttgctacctctgtagaaacatacattccagtttctttcttcacctctttcaaccaggcaagaccttctacaccgataccttcgaaacctcccggtttggtacgcggcttccagattccggcacgatatattttttgtcctttagcagccagttgtttggctgtatccattacttgttcttctgtttctgcgctacacgggccggcaatgacaatcggtcttttagcttcaacgcccggtaataaaattgattcgagttccatattcttatttgtttttattcttttaataacttgttttcattgaaattgttctgttgtctcattctgctgtcgttctctctttgtaagaggttagattcttttaattctttccagagcttctgccagcttattgtccttgcaacaaagtgagatacgaatataccttgctccgttactgccgaagataaatcccggagtgataaacactcttgcttcatgcagcaccttttctgtcagttcctctacatccttgcaggaagcaggaatctttccccagaggaacatgcctacttgtttctcatcgtaggtgcatcccaatgctttcatgatctcaccggcaaggtgacgacggttgcggtaattcttattattaccttcataccagtctgtttcagcctcaagggcggtagctgcagccagttgcatggcacggaacataccgctgtcgatattgcttttcactttcaatatccattgtacgaattccgcgtttgacgctagcatgccgatacgccagccgggcatattgtggctcttgctcatagaattgaactcgatgcaacagtctttggctcccggtacacttagaatactgataggtttttcgttcaggataaagctgtacggattatcattcacaattacgatattcttgcgacgggcaaagtcaacgagacgttcatagatttccggagttgcattggctcccgtcggcatgttgggatagttggtccacatcagttttacgcgactaagatccattttttccagtgtcttgaagtcaggcatccagccatcttcttctttcaggtcgtagttgataacttccgctccgagtattttactcaaagaagtataggtagggtatcccggattcgggactagcacctgctcacccggattgacgaatgccagcgtaacatggagaattccttctttagagccgattaaaggctgtatctccgtattcggattcagttccactccataccagcgttgataccaggcagcgaagcctttgcgcagttcagggatacctacatacggttgataaccgtgtccgttgggatcatgagcattgttgcacaatgtttcgatggtttcccttgagggaggcatatcagggcttccgataccgaggctgataacatcctttccctctgcattcatctgtgctacctcttttagcttctttgagaagtagtattcgctaacacttgccaatctgtcggcaggagcgattttatacgtttgactttccttctgcatattcgcctaataatttaagttctttggttaatggagtgattgcagcaatagactgcttgtatcttagataatcgttgaaagctacatctacgtaaaactggtattcccattcccgtccgatgataggcaacgattgaatttttgtcagattgatattatagaacgatagaatggataaaacctgtgacaggctgccttccgtatgtggaagagtgaatacgatacttgccttgttggttgcattggcatgatgttgacggagttcgtctacttgccagggatcggcaacaaccagaaaacgggtgaagttgtgcttgtttgtttcaataccttcctgaaggactttcataccgtaacgttcagctgctgctttggagcagatggcagcgtgtcctttcagattttcattcttgatgatttctgcgctgcgggccgtatcttcaccttccaccactttcaactgcggatgttgattcagaaattcgcgacactgcatcagggcgatagggtgggagttgacttctgtcagatcttcccagttctcatcggggagacagacaaaactgtgcgagatgcgcagtttgtattcaccgataatctgtgtgccgctttgtctcaacaattcattgttgtgcaacaaacttcccgcaatcgtattctcgatggctagcattccgataacctggctgtctttccgtatcgaagtaaacacatcttcgaagttggcacaacagattaactctatttcttctccctcgaagtacttgtgtgcggcgatatcatgatatgagccgagtgttccttgaattgctatctttttcattgttctaaatatattatataaaaaaatcccgcgtccatattggagcgggattcatatgattgatttctctattcagtccttaagcatcactgtcacttgatacatacaaactcccgctctactttgttgctaaagtaaaagtaaaaaaagaagtaatatgcataagtaaatgatttcattagaatctatcttttttgctttggtttttaattctggggcaaaagtaataattttctgttagatgcaaacaaaaaacgatactttttttgttttcttgcctaaaatagatgaaaaggatacttaaaagatgccgggaagtgcttcaggctttggtcccaggttcttgaattctccgttcagaccagcttcctctttcggattcaattccagagatttcttcatgtcctctaccgaaccgtccttatcaccattcagtaatttagcacgtccgcgttctttgtaggcttccgcaaagttcggattcagctcgatggcttcatcaaacaggccgatggcttccgtcagttttttctggttgatataaagttgccctaaataaaggtatgcctgttcgttgaacgggtttatttccgtcaccagtttgtaatcttcttctgcctcttcgtccttgccgtctgcttctttcacttttccgcgcaggagcatggctgtctcttcttccggattctgggcgagcacagcatctatatcttccatcatatctttatactgtttcaggttcatcaatgcttccgcgcgtaataggcgagcttcaatgaaatcatctttcaaagtgattgctttggtgagatgggcaatagtcatcaggtcgtcatcctgtcccttacgggctttccctaatagataatgagccacggcatttccttcttcgatggcaatcgctttattggcagcttcttccatagcctgataatcttcctggatgaagcatacattggccagtgtcaggaaagtgcttgtgacgtcaggttccatagcagccatcttttccaatagctcgcgggcctttgccgtttcccccatctggatgtagagttggctaagatagcccattgtttcaaactcttccttgatggcaagagcttcgataaaacattttactgcataatccggacgtcccatgcgttgcgcacgtaaaccgtcgtatttgaaaatctcgaaatttttctgatcgtttttctgtttttcactttccggagtttccgacttaccggagaagaaagatttaaaaaagttcggcatggtgtgttatttttgagttactctttgcaaaggtagtaacttattttgaaatatgtatcattccatcctgcatcttccattcaccttcctccaataaatattggatgacttcgctgatgctctctttttccgcttctatcttatcggctatttctactggtgtcagcggtttctgggtgagtaattctgatattttctttttcagttcctcgaaatcgaaagaattctcggtcagggcatcggttgcacggtgactaagacaaacatcgcattgtccgcagttgtgctcgttcttctctccgaagtaacggagcagcatccggctccggcacacattctccgaagtgacatactcttccatcgctttgatgcgggcttcataccgggctttgcgttcttcgtagacggaaggaggaatatgcacaaaacgaagttcctgccgttcgcgggtgtatataatataaggtgtctttttgtgcggaatgtaatccacgatacgacgtttggtaagcgtgaccagtatattataaatttgttcgcgggtcagtccggtacgtatggacagggttgcttcgctgatataggcatagtcggtgaatactccggtgtaagagcggagaatcgtctgtatcagtgcttcggcttccgttcccatttctcgcaatttgtatagttcgtcccggcgaatcgtgaaaagaatacgagaggcattatcctgttcgtccgtatattccagatagccggcttgagtcaatattttcagtgcactgtctaccggaaccgggaagtatttgaacttccggcaaaactcttccagattaaactcgcggacacattggaaaccgtcgcccattgccatctgatagtaatactgcaaatgttcgtagacattgagaatatactccttgtcggggaaagtatccacaacgcgcctgtgcagcgtcgttctgtccgttttggtgtataagattacagcatacgctttttcaccatcccttcctgcacgaccggcctcctggaaataagcttcgagagagtcggggagatcgagatgcaatacgatacgcacgtcgggtttatcaatccccattccaaaggcgtttgtagctaccattacacgaacttctccgctttgccagcgtttttgtctgaggtcttttacggcattatccagtccggcgtgatagaagtcggcggtaatatcttcgtttaccagtaactcggtgatttctttggtgcgtcgtctgttgcggacatagataatggcgctgccgggtatctttcgtaagatatgcaacagctcttgagttttgttatccgtttgccggacgatatacgccaggtttttccgttcgaagctcatgcggaaaacattctcttcacggaaatccaggcgagcttgaatatccttcactacttccggagtggcggtcgccgtaagtgccagtaccggaattcccggtagcaatgtccgtatttcggcaattttcaggtaagcaggacggaagtcatatccccattgtgagatacagtgactttcgtcgaccgtaatcatggagactttcattgatcgcagtttggtacggaatatgtccgtgtccagacgttccggagaaatatagaggaatttataattaccgaagatgcaattctcaagagcagtgagaatctcctgccgtgtcatgcctgaatagatggcaagcgccttgatgccgcgtttacgcaggttttgcacctgatctttcatcagggcgatgagaggagtaatgacaatgcaaatcccttcctgggcgagagcaggcacttgaaaagtgatggacttaccgcctccggtcggcataagtcccagtgtatctttgccttcgccgatactggtgatgatctcctcctgcaagtcgcggaaggagtcatatccccaatattgctttaatatctcctgatacttattcaatcggctttatatcctcgatttgaagttgtacttcaccacgcttgtgcgtgttttcttcaatggtgtaacagatgtcgaacgaacgtttcgttttgatatagcgcacgtgcgaactctgtccgaacgcaataccgttcattacattattcgatttattatcgaccagttcgagtttgatatgttcctgatcgcgtcccaccactttacttgttccgtaatcataaacatgatgagtgcagaaaataggtttcgtgttatcaggaccgaaaggattaaactttttcaggtcgctgaagaacttggatgaaatatccctgaaatctatttcagcatcaatctcgataacggcactggtttgttccggtaagatatgctgtgaaacgtattcttcgaatcgtttggtaaaggcattcacgttttccactttcatcgacagtccggcggcgtatgtatgtcccccgaagttttccagcaggtcgcggcaatgctcgattgctttatatacgtcgaagccggaaactgaacgtgcggaacctgttgccatatcatccgtccgggtcagtaccacggcagggcggtagtacacttctgtcagacgggaagctacgataccaatcactcctttgtgccattcttcgttgtagagcacgatggagcggcgatcggctaatccttccagattggcaacgatgttgtttgcctcttccgtcatactcttgtcgaggtctttccgggtttcgttgtactggttgatttgtccggctttctcaagcgctatcgagaaatctttttccgtcagcaggtctacggcttcttttccgttttgaatacgtcctgatgcattgatgcgcggtccgattttaaacacaatatcactgacggtgatttccttttcagaaagtccgcatacgtcgataatagccttcataccaatgctcgggttactgttcagttgcttcagaccgtggtaggcgaggatacggttttcacccataatcggaacgatgtccgatgcaatactcacagctacaatatccagcaaaggaatcaggtggtggaactcgataccgttactgatagcgaatgcctgcataaacttgaaaccgactccacaaccagaaaggtgagtgtacgggtacgtattgtccaggcgtttggcgttcagaatagctacggcaggcggaagcacatcatccggtacatgatgatcgcagatgatgaaatcaatccctttctctttggcataagtgatttcttctactgctttaattccacaatcgagtacaataatcagtcctacaccggtttctgcggcgtagtccactccttttttagaaatgccatacccttcattgtatcggtcgggtatgtaataatcaaggttcgaatagaactgttgaataaacttgtagaccaatgctacggcagtagtaccgtctacgtcataatctccataaattagaatacgttctttctttcccatcgccctgttcagacgttctactgcaatatccatatccttcatcaggaacggatcatgcaggtcgggcaattgcgggcggaaaaacttcttggcatctgctgcctttgtaattccccgctgcaccaaaagttgtccaagtatcgggctaatccctagttcctgggccaatgtctggcttgtctctgcctgttcgggtgtaatgggtcgataattccatttgtgattcattttatatattgttttttctttttctgttctcaagggttgaaaaggcacttctttccaacaaggggtaaaagtacgaaaaaaagcggaagtgtatagtagataagacgaaaatatttcaaggctgtagaaaacagaggtttgataaaggtagcttttttacttgtgaaagatatgggatgctgacaagcaagtgtgaaactctattctaactaacttgtcctgtggtcagttctttttttagaaagtcgtacacgtaaccggcactttggtaataaagtcccgtagtcggatcactcaaacgctcaaaggtgtcggaattgtagtagatttccattgcttgcgtcatattatactgccattcctccatgagtatccgtatgatttcactacttaaatcttcaatcatacattctatttgtgtattcgtcagcttcatagtttctttaggtatgaaagggcatgttcagtgccgaagtaatattgtatggtcaacccgttggcatattttagttcttcaatcaatctgctcattgaaatgtctcccatgctgtaacgacgtaactgataggttactccgtcgtcggcaataggaccaatgactatatcgtaagtgtgtgcaggatgtgtatggctacggtcgcggttgagtaaaacgaactgtgcccattcttcacagtaatcatcgaatatttttatttgcagatctgaagtctttattatttgatcttccagttcgaagatggtcacacatggctctccggattgtaattgatcggttttttgtttggctaaggcatgtgcctgttcataaccgggagaaagataaaatccttggccaaagtctttgaagggctttgaacgagataggtccggcttgtctatttccatatttgaaccatggtatagcttcattacagttgtcctccatttctacggcataccattgataaagcttcaatagaatcttcgaaagattgtgtgtgcattacttcatagtgtttttgtaaaaaaacaaggcctttaaaacgattcaaatagttgaatgcctgtttttgcttgatttgataagtcgctgcgaactctgcgattaaagctacagtaaaattcaatttgtttttctctatgcgagacatcatggttctcctttcttcatttgtattaccttccgaaaacaaagataggaaaaactctgcaatatcaaaaataagaagctattaaaagttgacttaaagctctgttgctcactctgaattagatgcagtcagaagatatggattatctggatagtaaaaaagggaggtagagaaaatggagcgagcggaaagttacagggatttttggatgaatggcgattattaactagctttagcggcctaaatgattcatttctctatctatgataaaaagaaacttgttaattgctatcttgattttatgttctatcggaacattgaaagggcaaaccgcatccgattctttggcaatcgtatctgcccaatggaaggtggaaagtcctcaaaaaggactcatttataagtatgcttctatcccccgattgtatcagggaccccagtctgttagtctgatagaagttgatcccggtgcaggcttgaaagttgatgttgccgtttcggataaaatgaaagaaacaagtaagattgcttctgaatataacgccattgcagccattaatggctcctattttgacatgaaacggggaaactcggtctgtttcctgaagacggatcgccaagttattgatacaacgctgcagagtgagtttaaacagcgtgtcacaggagccattagtgtgcgcaaaaggggaatgaaattaattccttggaacaaacagatagaaaagaattataaaggcaaagcaggtacgatactagcttccggtccgttaatgttgaaagacggacaggtttgtgattggaactcgtgtgaaccgaattttatccggacgaagcaccctcgtagtgctgttgctactactaaggatggaaaaatactgttgataacggtagacgggcgttttcctgaacaagcaggaggagtgaatatcccggaattggcacatctgatccgggttttagggggtgaggatgcattaaatttggatggaggtggatctactactctttggttgtccggtgcatcagataatggagtcgttaattatccttgtgacaatgggcggtttgaccatgccggagaacggaaagttcctaatattctttatataacgcatcaataacgtttccattattcttcattgtatttaaggtctttcagtgcatagattaagacttttcagtgcagaaactagtgactttttatgcagtcgggtggttgccctgttgtaacgggacaatgggcactttataaaaagacgaatgtcaccttatagggtgacatttatcattctataaggtgactagctatcctcaaaaggatgaaaattactaaagatacaaaattaattagtgaaaagcaatagtagggtaagaaatttatctgtattgcaaacaggcttagaattcaaatccgaatctagctcctactccatgtaactcccatgtatcattccaactgttatgataataatgccctccatagctgtaactataatccgttgtggtgtcataatcttggaagttatacatcaaagctaaattcaaggcctttttcccttttaaagaaaaacgtactcctactcctattgaagcatacgctccttctatgtctcctacagcatatccggcttttacgtcggcgaacggagtcacttttttgttgatgaagttagctctgaagttagcatagatgggggctgcataaagatctgcatcggtatagtagttgaaagcaacgccaccacctacaaagaaataattgttgaattgataaccatgtgtggttgataattcaattttagaggcattgtagtcgctcacatcgccaatatatgcaaagtctacgaaacccttatagccttttaatgtatttcttgcggctttgcggtcgttggtatccttacgataatctcttgtgtaccgctcttcttttgtgattttagtcacatcactcatctgacagatgatgaggctgccatcacctgttttgatttttaaagagacattgggcacttgttcaatgattactcctttaataatgctgccattctttaaatacactacttctgtgtaattctgtgctgcgacatacgtactgatacttaataataaggtcagtactaatagtagttttctcatacttgtatttttattgtttatagtttcttgagtgcgctatagatagagcctgcccaatagttgcgcaatccgaaaccacgtgccttgccgtcggtaatccattcttcaatgatttcctttgtttcggtattgaagaatacgacttcatacgttcctctattgtttgatttgtccaggaactgtgcgataaacaccatacctactccgggtgttttctggataggcaatgcgttgatggctgctttgatttgctctttactaagagtatattctcttttagcagtcattagctcggtcaggtcgatgttttcgttcacctgattaacggcatccagtgaaatctctgtcacttcttttttcaattgttttcctacgttatacttcttagcttctgtgatgaacagttcattgatacgtctgaaagcatctttgaattgtgccggtgattcatctgcaccgaaaatttttacttgggagtagtctaccccatagaacttaatagactgaatgtctttcaatgcactcttgccttgtccgaaacagaacaggctcgtgctcaagaataagaatagaataagttttttcatatacgttaatgttaaagtgatatagttggttactaacttccaaaagtagaaaataattatcgtaaatcaatgaattttatcgtttttcgactcattggaggcatttgtatcttggcaatgtactctgccgattcaaaattgatgcttggcgccactctgactttcgaacggaacagatctttaatctctttggcaaaggcttcgctacggttctcgcttccgatacgaatcagaatctcatccgttcccaattcattggtataaacttcaatgatatagttttttaccgaaggtatattatccagaatgtcgaataatgcaggcggatacaacgtcgttcctttgtatttaatcatttgtcctttccggccgaggatggagcttaggcggatggtatttctcccgcaaccacagggatcggtgtggtggtagcaaatatcgcctgttttgaaacggagcaacggcatacctttgactccgagcgtcgtgatcgtcacttcccctgcttctccctcttccacaggacgattattatcatccagaaactctacaatgataagttccggttgcaaatgtcctccgtggaattcattacactcggtaaaggacgactgcatttcggtggaggcataagtggaatacaactgcaaggcaggccatttatcgtgtatcttctgtccgagcgtattcaactggaattcctgattgcgcaatgcttctccgatgcagatgcacttctgcatggaacaggtattatggtcgatatggttcttttcggcaaactctatcagtttgataaggaaagaggggactaccattccacaagtcggatgtatccgtcgaatcgtgtcccattgcagttccgggatgccgttgcctacacggatcactcccatacccagttcgcgggctcccatataatatgccaagcctgccatgaaacggcggtcgatggtagtcatcaattgaagaatatcttgcttggtgcatccggtggtggtgaaagataagtattcgttgtaagaaagacggtccaggtcttcagaggtgagaacgaaagtgaccggatctcccaatgtgcccgaagtcgtcacatagtcgataatttcctctttgtctacgcagatgaaatcatcgttatggagttgcaggtccgtcttggtagtgacggggatctgttgcaagtcttcaatcgtctttatttgattgatatcaatgtgatgttcggcaaacatctgttgatagaacttggaatgtgcttgcaggtaggctaacactttggctaactgttcttcctgatagcttttgatatcttccggtgagcggaactgaatttcaggattcttttccatctttggattgtttttgaattttctgttggatacgttctttctcttgcaacttgggaatggatttcttcaatgcctgttgccagtatgcaatggcctgtttagattgctgcatggcctcgtagtaatctcctattacttcatatacatagtatagggaaggattggaggcttggtatgtttttaaaacagattcctctatctgttccttttttctgattttcttcaataaaagcggagtcagtttcttatacgtgagaagatgctggaactccggtgtgtcgatgaatttatcttccggaatggtcaggtcggaactgtatatttcgtgttgccaatcaatcgtgtctttgaatatcttattcaggtcataggttacgtatttcccacattgccagggagaggtcgatacccacatcagccgtttctccggttggaagatgacggaatgatgggcaataaactgattgatggccatttcgttggccagtcccaggtctgtgttttgcaggcctttgtggtcacgcaggatagaggcggctttggagacatcgatcggaagatcctcattaatgagttccgttaatcgtgcaaaacggtatgggctgtcggaagtgcggatattttccatgtttcgttcgtccttgctgaattcttccgattggtaatggttggtgcagatgagccgattggcttcttttccggtgaaaagcacagttttctccggagatttctcgataatcgcggctttgccatctttggcagaacctatcaatatggattcggagacgaatgtttcccgttttttggcgatggcaaaggcttcatcaatagtggctgcatattgcagaatctctctggtcaggatggaaatgggggtggcggaacctgtcgggacagcagatttggcagcattaattgtcacggtaagacctgtctcgttcatgccggataacactcctatcatacccggccatcccacagaagcaaacctgtatccttgctccggtacataaaaagccacctgcttgttctctgcgaaggcatctccaacgtagaaatcgaagttacgtccaatcagcagggatgaatctgcactttgtgttccccaagtggcgaacgaactgcatcccactaacatataatcttgcatggcatgtcccaggtcgtgtgccgaatggtaattcaactggcgttcgtaaggagtgccgatgaagtcgtattcatgcgtacatgatagcgagattccgtagatctcgtcgcggtattcttcgaggacgttctcacccagattacggttgaataatacaatgaagaaccggaggaatttcagataactgtctgaaggaacaatctcacgaatctgatccacgaacactttctcttgatagtggagcaggtcggaagacagtttcccgatagcttctcctctctggaaagcatcccctttcacaaataattcccataagccgctgtcgctgtgccggagaaagttatctccataataccggaggtggagactgtctatatcaatcactttgtctgtggtcatgctttgctcatgtttgggcgtttgcatatctgcagaaaagtagagatagctgattccggctatcaatagaacgatgagcgacaggaaaaggaagcccgtgtattggagtgtctttttgactattctatgcatttcctacttttttagccagatattcttgtcctacaaactccgcacaagtcagcatggcagttagtgttacccctaatgcaccatgcacattcaggttttgaccggtgagaaagagatttcccaagcggcttcttgtagatacgaaaccaatttgcggacatttataatctttgatgatcccatacgcggaaccatccactgttcctgtatagtcccgatagcttaatggagtagtggcatacatctcttctatgttttctgaaagatcaatgccatgtccccggatgaagcggagaatctgttttgctttctcctttttgaaggattgatagtcttctccccgatgttcgggagtcgtgtccttccaggcggacagttcatctatatacatcggtgtcaggatggaaatgacactggcatattgactgtcctcggaagacgcttgcatggaaatcatacagttggtggtccgtcccggatagagcagtttgtcataccacactttattgttcgcatgcagatacaggttgcggttctgatagggagtgcttcttttcttcattatcaggtagagcgtaaagatgccgtaggtgttttccaacgaacggatgcgggaaatataggcattcttgatgctacggtttttatccagtatctccaatgtccgttggggatgcatattggagatgacgaagtcgctttccagtcgctcttccccgttgatgataaccccttgtaccttttcgttttcaacgatgatgcgggtgacttcactgttattgagcacggtccctccatttgcccggattacattgattagctccagactgacttgcatacttccgtctacaaaacggtaggcgccttcaatataggagtgattaatcatggcatgctggtagaaagtggagacatctttcaaacctccgtagagtaaagctgaacctgccagtacatttcgtaaggcggggtccggagtgatatccgcaatcaggtgggcggcagaggtacaaaagtatttcataccctccaaagcgagtgtgccttgtttcaggtggtctacgctaatcaggtttccgacagcttgaagctgttcggcatagcatttcaagttttctttctcatgcgggaaggaacggcagatggtttcaataaactgcgggtatcccattgcataatcgtatgtttttcctttatagtagatcgtatcaaaagcagcatcgtccaagcgttttattttcagcttgtccatgataccgaaatagcggaaatactggttcatcacttgaccctcatccaggcttcctacataatgaatacccgtatccaacagatgcccttttcgttggtaagtctggaagcatccgccgaattgcgcatttttttctactacgcatacgttgaatccctctttgctaagaatcgctccgcattccagtccgccaaggccgctgccgataatgatgatgtcatatttgctcatactagttcggttttctaaatatgtaaatggtgtttgatgtatatttgtcattaggaatgatttcgacagccattccacaggcgactgctatttcccgtaattgggtttcagtggtgaaatacagctctccggtcgtccggttgaagttgaaaatacgggtggatagcaattccgtgaaccgggttaaccggtgcttggaagcgttggctgaatttccgtcgcgtatgataatcattccttgtgaacgtaagcgaccggcacatttcaacaatagggtttgttgatgttcgtagctcatatagtgaagcatgtcgttcaggataaagacatcactttccggcagaggatattccaatgcattgccatgcttgaactggagatgctcgttgcgtaaccatccgtgctgcgccagccctatcttgtcttcatcgtaatcaatacccaggatttcccggtcctcggaaagcagagacagcatatagcataacgggccgaagccgcaaccgatgtctgtgatttgcccttggacgggaatcaaccggttgaatagccggtaattcttttccatttttactttgatacggatataccattctatgacgggacctttatagatatagttttggataagagcttcgtagaatgcaggattgttcgtcgtgttctgttcacggcagatacgggcataaacttctttcatgtaagcggatatgcgtttggtacgctcctggtaagtatttccgaaagacagttcgtctaatggtatacggggaagtatttccgtatagatgattcctttccggatattgaaaggttgtgctttggcaatgattttgttattaccgtaaagcaggatcgggagaatatccagtttcaatgcttctgccagatagaatgctcctttgtggaaacgtttcatctttccgttataggtacgtgtgccttccgggaaaatggcgatggagtagccctccttcacttttttccgcattcgttccatgtattgctcgtatccttcgcctatataatagaaatcaacataacggatgattgccccaaagaaaggggaatgccatacccagtggttagtcaccatcaggattttggacgacagagacagcaataccagaatatcgatgaacgactggtggttagcaataataattgccggctgctcaaagcgttcgttggttttgttgatgtgctcttttttgacggcggtggccagtagcagaattcctttgcaggtgatttgtatcaggcggcacaccaaacgctgcttgctgcttttgcgcacaggcaccggataaagcagaataatcaatatacggaggacgatgcagccgataaagaaaagcaggaagagcaacacggtacgtatcaatccgataagtgtataaggcggtaatcctttggaagcggggcctgcgatgaagaaccggaaaatgagtggctgaatggtataggccaccagtactactgctatcatacccagaatggaaatcagggaaatggattgcaaagccgggtgtttggcaaacacaagtgctcccataccgaccactgtggtgaaggcggagaagaagatagccgttttatgggaattcaacaccttctgacctgtacggtatttgttttgtagcccgtccataatgaagatactgaagtcatctccaatgccaaagataaaggtggacaggatgatgttgataatattgaactcaatccccagaattcccatcaatcccaagatgattacccagctgattagcatcgggagaaagctcatcagggtaagttcgatacgtccgtaggagaaccatagtgcaaagaatatgaggaaagaagagatgtacagaatcaggtaaaagtcgtcattgatggccgatacccatttgttggcaaaataggaacggtcgaagatgactacattcgggtctttattaaagttctggtacacagcttccttattcggttcgctgatccgtatctggctgataagcatggtgatggaatcggcagaggtttgccattcatttaatagcttgccggataaatcgtctccttgcgcggtgtaatgatattcaccgaaaggctggttcatccattgataaaaaggttcgaagcttcccgggcggaaacgatattcggcggcaactgtttccaactgttcacggacttgttgctgtttttcatccgtccagtaatctttccatttcttcaggcgtttttgctgctcttgcggagagatcagaaactgtgaggcggaggcatactctttgatgagtccctgctctttcagtgccgataacttctgattggttgttgcataagtttcggtagcctgattcatgtcttttcccacactgacaaaaagcacggtcttttcgtcgttgtcgaagagttgcagtaatttttcttctgattgttggagatggcggggctcatagttgagactcatcatatcgttgttgaagcccaccttttgcgaagtaaacaaacagattactgtaatgaggaggatgccgcctaccagccatttattcttttcgtaagaataagcgtttattttctcgatgatgcgtagtatgcgtccctgtttgacgtctgcctgtcctttcagaaaatgaggcaggtaaatgaggcagaagagggtagtgcccaccaatgccagagaggcaaacaatccgaagtcgcgtaacagatcggaactggtgaatatcaatcccagaaatgcgccgatggtggtgaaactacctaccgtaagcggataggctatctctttaataagttgttgaacggtggaaacatggttctggtgtgccagcatgtgaatggaatagcttagtgcaatgcccatcactgccgaaccggctcccactgcaatggcggagatacttcctttgataaagaaaatgagaaacagggcgaataatcctccgaacagtaccggagtaataatcaacggtatcgatctctttcgtttaaaaacgagtgagataaatacaatgatgataagcagtgccagagaggaagtcaggatggtatctttcttaatctgacgggcgttgtagactcccacggagggaccgccgaaatattcagctcgaatggtaggagattctccctgtacgtgcttgagctcttcttcgagtatctttatcagttcgtcgttctttccggtgctgcctgtactgaataccggggtaatgaacataagtaaggtggaaccgtctttggagaagatatgttcgtcataaatctcgtagttggcttccaactggaaatcttgcaaatgtttcagggtttcgcttcccagtccgagcgggtcccggagaatatagcttcttaatgcaattccggcaggagagaggagattggtataattcttttgcatgacagcctgtatccctttatccgtcagtaaggaatcgaagcgttgatagtccgtatctgtcaggaaaagcggaagatgttcataaacgaagtctgtggctccttggatgaggctttggtctacctgtgcgaaaattcctttaatcagttttcctccggctttttcagtcagggtttgttgcagttgtccggctgcttctatcagggagtcgggttctacgcggtggcaggtatctgccgaggataacataatgataatcttatccttaatcttgagattgtcgaacactttgattgtgttctgggaatctttagtgtcggggaaaaattgtgtgatgttctcttcgaaccttacttgcagggcaaagaatcccattaacaggacacaactgatgagtgacaaatagaacagaatcttgtgcctctcgaaataatcatatagtccgataaaaaactgggtcatatcttttttttcctacacgccgtgagcagaatgaacgcgatggttcctgccagtatgctgcaaccgactgcaaagataacacttcctattaaatattgctctatgactgattttacattttcaaaagaaagttcgtttaaatgcagattgacaggatctcccagcactttgcaaccggttacgtaactgccgtacagcaaaaatggaatcatcggagggatactgatattggctgctacaatagctatgaccttattcagtctgaacaaatgtgccagaaataacgtgattagcatttgatatccccataccggaacgatccccatgaatacgccgagtgtgatggcagccgtgatccgcagattagattcgggggagtgggtgacatgatccgagaaaaactgcttgcagttcttccaggtcagtttacggaagaagttccgggggatgatccaaaggaaagtgacgagcaccagtactgtgttcaggatactgatacgagtgaaatcgcggaacggtcggaaatgagaaactcgctcttcctgtggcggataataaacatgtaccggaatgtttttaacggtaatgcctccccaggctgcaaagacaagtgcttccagctcaaattcgtatttggcggtgtaataccacttgtccacattcattcgttggatggggtacaggcggtagccggattgagtatcttgcagtttgatacctgtttcgagggtaaaccagaagttggaaaacttattggcaaatgtattctttcccggcatattgtccgaggcgaggttacgggcacctaccaataatgtgtccggttctttttctatggcttcgatcaatgcagggatatccgaagcgaaatgctgtccgtcagaatcaatggtgatagcataccggaatccttgctttttggcaaaggatagtccatgtctcaaagctactccttttccttgattgacagggtgggtgatggtatgtaagttagattcccggctaagtatttcggcagtttcatctgtagaaccgtcgttgacaacaaggatatcgggggcgtagaaacgtacactttctatgacgtccgccagtgtctttccattgttgtaacttgggatgataacgatgatccctaattgtttcaacttctcgtgccaataggctgtacttatttgttccttcatactgtcggggtaagtgcagcttttagtttgatgaaacattcgttctttacggtattttcttctacagtgctctctttcactgtactcttttttacagcatccttctttacagtcccttccgcttgcagctgaagtgtactttcttctgtctctttaaaagtcagtgccaccgaaatgtgcggtgtttctataggattgatagccgaaagaaacttgcaggaagacacttgtgttacttgcaatttttgctggcgaatgtcttctacacattccttgataagttgtaacaggcaaactcccggaactaccggatgtccggggaaatgtccctgataaacaggatgcccgggattcaactttacttggatagtccagatcgttgagtccgatgattcggaggaaaggatggtatagaagttatcaagtagcatatattaaatctctttagatagtttgtccagacggatcgttaaccgaatccacggatgtttgatttttatttgtgcgggatcgcccggagtattgccagtgatgtagaccactgactttccaaagccttttccactggttcttttttcagtagcactgtctttagtcgttttcacacgaatatctttcccacttaagaacagacgtctgaaatccatctccagaagtttcagcaccttttcctttttcatgggttcaatgcaactgttgacagtaaactgatcgttgcgaagagaaaaatcgaaaaggcttagtccgaagtaggtagacgctacgatccggatttcgttatcaggcatacggcgtactattagcataccgctcatgtgatgtttcatgaaatccagttggatattgtatttttgcgagctttctccttgtgttagttcgatagcggggagcacagtacttccttccccgctcatccgtggagagcaggaagtctggatctgtatccataagaacagcagaaccatcagactaacgaatcgcaaacttcgtctcattcttcagggagttgaactttttattatagaattcgtattctgtatagtttgtggctgtttcggacagacggagtttgtgtaccgacatatctttcttgtccagatagatttctataccggcaatataggcttgtaccgctttgttggtcggttttattttaaccagatagtatcgtgcgtcttcaaaatactccagcaggtagttggacgacattttagacaggtcgcctatcatacacgcggtcagcatatcctgcatctgtgccatcattttgttcgaactaagattcatgatacttttcttgccatccgaaacgattttgagcttactgccgtttatcacgatgagataatccatcgggcggaaatattccatgcagattttatgggtcttctggtagtagaacttccctttggaagtaaccttctcatcgaatacatcgagatatttcacttgggtgaaatcgctttcgatggactctacggtttgcgcctcctttgccaggcggctttcaaactctgtcttttgcgccatctttttcatgctctgggcatggatagaggctattgacaagaagaaaagcgataaatatattaataaagttctcatacctttttttattttatgccaatagtttgtccggacggacaacggtatatccttgttctttcagcaaatccaagatttgtttcactagctggtcgctgtcaggcatccggtcgtgcaacagaataatggctcccggttcaagatgtttccgaatcctggcaaggactttatccggtgcttgttgtgtatccagtgtacggatgctccatcctataggggtatatcctaactgtcgaacggctttcgcaatcgttggattagtgacaccgaacggcggacgaaacaaactaaccggctgcgaagttactcgttctagttcacactgacaagtttgcaagtcttttttcatcttggagagcccgtatagcgggaataaaccggaatgggtatgcgaatgatttccaatcagatgaccttctgccaccattttttgcaagattgcttcattcccttttaccttatgaccgatacagaagaaacaggcggttacctgatattcttttagtacctgcagaactttgggagtctgtagggagtcggggccgtcatcaaaagtcagggcgacaatcttttccgcagtatgctttttgcaaaatgaccggaggtaaattcccgattgaatgctataagaggcataaacgagaaaagacaggagcaagagcaagcaaagaaggaggcaaacgattatcatacgcttttccggattagaatcaatgaatgattgatggagtggtgatgattataaatcaatatatgggtcgaggtagtgccgttggccgattcgttcactgctttccataccgcatacgatgttgcggtaggatattcaccacattcattcttaaaactaagatgaacactttccgggaaaaggtttgtttcaagctcttcataaatagagttgccattgtcaacagtttgctcgtgagagtcatcttgattgtgtggcttcttgtttttcccggtaaccaaccactgaatatcctgacattctaaaccatttcgttgcaaaaaacggatgattcgggagctgatttcttctgtagtctgtttccctatgaaagtttcgattccctgtatttcagccaacggatgctctccggcttcccgacttaacaggaagaattgagcaccttctccggctgctatccctttcagcactcccagccgttgctgaatcgtgtaactggtttctgtcatttcatcgatggctcccacaagtatattctcgcttccttctcctattttcatcatagcgtccaataaagcactttcaaaactaagaccacggtggacataagtcatgttgtaggcatgtatttgatgaatcagagctatttgtgcaccgattgtattgaatgtcgactggataaaaggagtaggattcagcatccgctcttcattatccaataggttgttcaggaatttttccgtatctgtcaagcagcccaatcctgttgctgtgatgattccttgtatcttttcaggagatagttcacccatacattccaatccgcaagccacccccatttttacgatacggctcatgcgtctgcgcaaggtcgcattggtgataatatccttataatcgggttcgcaagcctgaagataagggcgattatttcctggtgaatgatcctttggcggatgaatggaagcgatgcgttgaatataaactggctgcataggcttaaatacttaaaggtgcgtttatgctggaaaattcgttgcggaaaagaggagcgatgaatcgtttcctccgaaaccgaaagagttggataacacatgtcggatggggattccttcttgaaaagaggtttccggtatcagtcctgtttccggcatcgcatccgtaaagttcaggttgggataaatcagccctttatctattgaaagaacggagtaaacagcttcaattccttcggaagctcctaaggtatgtccgataaaagcttttaccgaactaaatggcggaacgtgttctccaaagattcttcggagcgccatgccttctgacgcatcattgccgggagtacctgttccatgtacattgatataatcgatttcttcaagggaaataccactggaagcgatagcttcactcattgacagaaaggcaccgtccccttcaggagaacttcctgtttgatgataagcctcattcgtattggcgtaaccgctaagttcgcaataaggagttctttggagtgaactttccgattgaagcactaagtaaccggcaccttctcccagatttaatccggtacgtgagcggtcaaagggacggcaatgtgttttgtccaaaatcatcagggagttgaatccattgagcgtaaaccggcaaagtgcatccgtacctcccacgatagcagcatccagtagcccgtgtttaatcattcttgctcccagcatgatggcattggctgctgacgagcaggctgtactgatggtggttataaaatcattgatacccaaatacgaagcaatcaattctgtactggctccgcagtcgtgtgaaattacttcccgtaaccgtccctgtcccgggtttttcttgaaagattcatagaagtgctcgctcaaatccatgccgccaacggaagtggcggaaataaaaccgatacgtaatggtggtgtgagtcccgcatctttcattgcttctttggctgctatcattcccaacaaggccgtacgtgatacagtgcgttgcggaggtaaagagatcagttgctttagttcctcattgctacgtttcacttcggatacgggcacatcgagagcagtcggaaaaagagttacttttccgatgccatgctttctttgtctcaacgcttctatattttcggaaactccgataccgatgcccgaaacaactcccaatccggtgacgtatatcttcatcggttaagctttgcgattagcaatgatgtagtctgccagtgtacgtaccgagtagaagatttgttttccttcactggggttctctatctttataccgtattcgcgttccagaatcaggatgatttcgagtgcgtcaatggagtcgaggccaagaccttcgtcgccaaacagaggggcttcattgtcaatatcttccggagtgatttcttcaaggttcaactcttcgattagtttccctttcacttcgtccatcagttctcttttggtttgatctaaattatccataaatcgttgatatattattaagttgtttaaattctgcttgataatgtccgtccagtagttcgcaccagcctatgatacaggtgcgtaacttaccttttgccatcacaatccttgcataatcctctaatgaggcagcatcggattgccgacggacaaagaatgtattctctccctgaatcttgtgccggatacagatttctcccaatactacattggggagagtgtagacaaacacggcaggactggctgctttgtccccttctttactgatgattgcctgatgtttgcagtccgtatccagagaggaagaagcattggcaagaatgattccaatctcttccggacggtggtgtgtatttttcagtaaatattcggcagctacatatcccagcttacagaggttgtccatcttatagaacttcatattgttttctcccagatgcttgtatgcttcccggatgaacggtgcaaagtcagtttccgaagagctgaatacagttgttcctttactttctactgctcctggcctgattgtgaccatgttgcccgattccaccactgctttgcaaactgacggagcactcgctttgtcggttgcctgcaagtttactttctgtttcaggtgagcatcggggagggataataccagtgcggcattacagcctccgaaaccggaagcggttttgatgcagcatttcatcggcatcggctgatgagtggtatagacagtgataggcatgggaacaccgagtgtttcataccctaaagttccgtagtatcttccttcttttagttgctctatgcaaagtatggtttcgataatgcccgaagctcctaatgtatgaccgaaatagggcttgaggctattcaccggaactgcagctaatcccgccagatgtatggctttggattccatttcatcattgtaaaccgtagctgttccgtgtgcattgataaagctaatgtcttcggggagtgctccggcttcttccattgcctgattaatggctagagctaaaccgtcccctgttcgggaaggaccggatatatggttggcgtcattgctgattgctcctccggagagaataatatgattcgcgtttccttgagtttctaaaagaacagctccacaggcttcgcccagacttaatccatcccgttgtatatcgtatggtcggcaaaggtgtgcgctgacagatcgaaacgatagaaagccgctggtaatgaaatgagaaagaatatccccacctgccacaatcactcgtttgtaacgtcctgattctatccatctcttagcgacgattagtgccgagactcctgatatacaggcattggagatgacctctacctgatttgtcgctccaaagaaatctccgattcgttccgccattttccaaagaaaaaccggactgtcagcaggtaattcactcaataaatctatatttcctttagtggtagataataacaaggtacaatccggctcccgcaagtcggctcccgattgagaaataacctcttggatagccagtatgaataattgctccattcgggtataatccgtaatctgcatcagcttcgcccgtttttccaattccacagaatcaatcattcccgccaataggggatgatcggaaattaggccggcttcttgcatacggattccgcttcggtagttatggatggcctccaggttttccgggatgccgaaacctaacgaactaatcagcgtatgggctgtgatgtatatatttaaaggatattccatttctttttccattccagataaaacggaggattcataagctccaattctttattcaggttcaggaacacttgtatggtgcttccggtggctactatactctggtcggtagcccggtagataatgtattcaaattttatcttggctgcttcacaggcaatatagcgcgtttcgacaatcgcttcttcaccaaaagatagtgattgtttgaactgacaggttaaatccacgataggaaccatgtatccctcccggtaaatactcatataatccaaaccatactgtttgccaaaagcttctcttccatcttcaaaatagcgcacatactcaccatgccatacaatctgcatggagtctatttcgctgaaccgcactctgaaggtagtccggttagtcaaagctgcaacctgttgattcgttttccgtttcattctttttttataaatattttcatcctgcattcagctatcagcttgtcttccactttcacttgtgcagaaatcaatgtaatgtcgaatacctcctgtacaacggtaatctccgtaaatagtttcatcccgttctttggcaaatcgtagattttaagtttgtctaccgagccgataaaccctaacggtactttttcaccctgccgggtataaagaaatccgatacgtgctgctgctgattgagcgatgtgttcaataattcctgcctcttgcagttttccggtttcgtagaaaatattatcagcagtaacagtcagtccggaataagaatgattcttttcgataccaaagaaactgtccaccatcacgatgggcggacgctgtggaatcaaattgagtattccttctccttgtatgataacttccctgttgttcatttcaatctgcattgtacaatgctgtgtcccattcctaaatggtcatctatcttttcaacttccaatcccgctgctttgatgcaccgttccatatcatccgaatgatacattttgctgttaccatttgccatggctgtgaaataaagactgatttgtgtcaggcaataagcggctgtgtcaaacttttgccggttccagaaagtttccatgatatagaggcgactctccccactcatagaacgggctgcacgggtcagtatgctggttacttcttcttccgagaaacaatcaaggaactggctcatccagatagcatcgaaccctgtcgggaaaggtacttcgggatcgagcagattggcgccatacccgtgaatacgcattgctccgggtaggtctttagtttgttgacgcatcatctccaattgttgcggaaggtccataatagttacttccactgcatcgtcatagcttacgcatttggtcgcccatcgaccggtattacctcccacatccagtaaagtcttgggatgacgggcgaaaacaattgccaaagcttcgtcaaacgagcaatccgagtaataatgatcgaaaccgaaccagctcttttgtacctgtgagggcaagcttgacagcccttcatagatagtgctccattcgccgaatactttcagccctccgggacgtccgttggtgagagcctcttcgagatggaacattcccagatagttgacatcgtggttgaaatccatattgacacgtaccatcctgtcattgagcaggaaccatccggctttggcaaggcggtaaaggttttcgtgccgcaatacggtaccgatcgttaatgaggcttccagcaaaacttgtgttgcataagaagacaggccacaagccttgctgatttcttcttgtgtcatgcctgcacgttcgtcggctagtaactggaaaataccgaatttgagcataaggcgtgatacctgaaacacgatgggcccgaaagctatttcttgtgccaagcgttgtgcctctaccgcggtcaacggttccttatcatattgattctgttgcatctttattttgttatatctttatttcaatcctttggagggcgaaccgtcactcgtggttttccagaatgagtaatagttgaaccattgttccggatagcgtttcagtatttggtccaaagcggccgtatattgttcgagcagagcgatctctgctttcttttctttggttcgtatgactggttccgtccttataaaatgaaaacggtaggttctgcccggctctctcatggcaaagtagaataccactggaactttcattcgcgaaccaagcaggaaagggccggcagggaaaggagctttctgtcccaggagtgttcctgtcagcagtttctctttattcagataacggtcgccctggaagcatacatactctttcttgtttaacgcctcggtaatacggaaaacgtgtgtcaggttatcttcgttgacggggataatcttaaaatccttatcctgaccatttttctccaatatctctttgattctacgatgttcggcatcatacatcacgatattgattttctttccataatcgtcgaagaaaggaacgcctatttcccagtttcccacatgggcgccaatcataatcactccctgttcactgttcagtaattgcagaaactccggatactgttcgaattcgaaccgatattgactgacttttccgttgccaatggctaccttgtcaatcaggatttgccctaatcggtaatagttgcgcagcaacataaccaaagagcgtattcggttgtatttcaggatgtggcgggcataaaaccaggtgcttttagtggctttcggagcaaacggtacgaagtacaatactaccagacttagaaatatataagtggcagtaatgcccagatacttaatcaggtaaataaagaataagtatccgaatgttcctccccgggttttgcctttccacgtcgacatatttacttggcttcctgcatacgggtgataacgagatcgtagaagtcctggaaggttttgatacccgcaaaatcttgtccggttacgttgaagccgaagttcttttctaccagtaccaccatatcgaccaagtccaggctgtccagttcaagagtttccattaacggtgcatccggctggatgacgtcgatgtctacttcaaactcttctgccagagtggttcttatcttctcgatgatttcttcatttgtcatatatctgatttctttagtaaattatggattgattttacgtatgattagcgtggaattggttcctccgaatccgaatgagttggaaaggaacgtatcaaattccaggtttacccgttgggtaggtatatttaattgtgcagaggcctcgtccggttcctcgaaattgaggttgggagcgatgaaaccgttgttcatcatgagggtggaatagatcacttcactggcaccggccatccacatttcatgtcctgtcatagactttgtggaggtcacatacgggtgatgcccttcaaatacttccgcaatggctttcgcttcgttcaagtcacctaccggagttgaagtggcgtgtgcattgatataattgatctgttcgagtgcaatccctgcatctttgatagccatttgaagagaacgtttcggaccgtccacattaggcacggagatgtgatctccattggatgaaaaaccgtaaccgatgacttcggccaaaatgggagctcctctttttacagccgattcataactctctaataccagactggcggctcctccactcggaatcagtccgtcacgtcgtttatcaaaaggtttcgaggctttctcgggggctgcttcctgggtggaaaatgcgcttagtccgtcgaaacttcctactgcataaggattgacttcttgtgcgccaccgcaaagaatacaatcctgtaatcccgattttataagcaggtaacccataccaatagcgtgagaaccgcttgcacaggctccggcaatggtgaagttgacccctcttagtttgaaaataactgacaggttcattgtcacggtggaattcatcgactggaaaatagaaccggaacctaccagtgcagtgtttttcttttcacgaatgatgtccactgcattaataacaggagcggcactactatcattgccatacaaaatacccacttcattggcttcgagaaaatcctcattaataccggcattacggaaagcttctaatgtagcgagataagcatattctccctgctccggtagacagagacgtttacggcggtccaacaacttcttcaagtcgggacgttccaatatccccgttaatgcagaaaaataacccaattctttccgtactgggtctatgccaattcccgatttcccattatatagtgagtcttttacttcatccagattcttgccgatgcaagagtaaatccccattcccgtgataacaactcttttcattattttgtctattctatgcttttattttaagtatatagtcctccgttgatggaaatcacttctcctgtgatgtaggatgaggctggagatgccaggaaaccgaccaggtcggcaacctcttccggagtgccgaaacgtcccgcgggaatatgtttcttccattcgttctcatcaattccttccgtcatatccgtacggatgaatcccggagctactgcattgactgttactttcttcttggcaacttcctgtgccagtgctttggtagcagctattacgccacctttggctgcggagtaattggcttggccgggcattccctgaatgcccgacaatgacacgatatttacgatacgtccataacgtttgaccagcatattcttcaataaaggctgtgtcacgttgaagaatccgttcaggctgatatcgagcactttgctccattcttctcctgtcatccagagcatcaggttgtctttgcggatacctgcattgtttatcagtacctcgatatattcgtcagggtgttgggaagcccagttgcccaaagcaagggtgatagcggcagggtcggtcacatcgaacttcatcaactcgccattacttcctttttcctgtactaactgcaacgttttctccgcttctgcgtcattattctgataatttatcagtataaagtagcccatttccgccagtttacaactgacagcacggccgatacctcggcttcctccggttactaatgcatatttcattttatttatcttcttttttgagatagtctatcatcatttctatctctttatatttaggtgtgtcattggtaaatacagggaagaaactgcgtatttcttcataaacctgcctgcttttggaacttaggcgatcctgtattttcaggtagtcgatagcttgtgccattcccataaactggatagccatcacctgataagaattctcaatgactgtttttgctaatagagccgagttggttcccatgctgacaatatcctgattatcattgttgttggggatactgtgtacatacatcggatttgataatgtctgacattccgctgtggtggaggttgcagtgaattgtgaagcctgtaaaccatagttcaatccaagcactcccaaatttacaaacggaggcaggatgccattgatacggtcgtggaacagatagttaatctgtctttcgcaaagcatagtcagcttggtcacggcaattttcaacttgtccatttcgaaagaaatgtaatctccgtggaagttgccgccatgataaatattttgtgtatccggatcgacaatcggattgtcacaggcggaatttatttcgtttattaatacttcttccgcattctccagttcatcgtaaataggaccgagtatttgcggaacacatcgcaaggaataatagggctgtactttgtgttcgaagattttctctttatgcacctggttgtatagctcgttctctctttgaagcacgcatttactgcctgccacccattctctcatcatagcagctatctcttgttgacctttatgatgcttggcctcgtttaatgactgtgccataaaatcatcataagaggcggcaatctcattcatcattacagaggcagccaccgaccaacggagtagtttttttgcataaatcagattgacaataccgatgcctgtcattacagaagtaccgtttgtaacggataaaccttcacgaatacgcatggaaaaaggtttcaggccgttttcctgaagcaccgtagctgcgttacacaatttaccctgataaaaaacttccccttcccctattaacgtcagggcgatatgggccagttgtacgagatcgccgctggcacctacacttccgtgttcgggtatgaacggataaattccgcggttgataaattcacagaggagagaaaccagttccagatgcactcctgacttcccttgtagaaaagtgtacaaacgggcaatcatagctgcttttacataaagttcgggaagcggtttgccggcaccggtggaatggcttcggatgatattatactgaaggtcgatcaatgactgatcttctattctgtattgtgccattgggccgaaccccgtattgataccataaataatcttatcgctggaaaaggattgcagaaaatcgaagctttcctctacttttcgaatacattcttcagagagttccagcttctcattatcaaacaatactttatgaagggtatctaaatttatacttttgtcagctatcattttctgtactagatattttatgccttaataataaggtgcaaaaataggcaatttctgttatatagcggacatgaatcaggataaaactttttctaaggaattggttttgcttgttttgtttcttattcgtgggagatttgttccccggtaccgctcgatgctttcattggtgccggagggtgtcttcatcggtggggggggaatcaatctatgctttttgcaaatcccgtccttcatacttgcagatcgcttctatccattctttggtcagtggcatggactcatgtctttcaagatcgaaagtaaccatgatggatttgcaaacgcatttcacttcattggttttcgtgtcaatgacttgttgaaccagatgaaagcttttggtacctatcttagagacggcggtttgtacagcgatgtggtcggatgcgaaaatttgcttaacgaaattcgcttcaatatgaacaacgacaatgccaatcttttcccaatctactcccgggcatactgaaccgaagtattcagtctttcccaagtcgtaaaaggagaagtaaaccgtgttgttgacgtgaccaaatttgtctacatcattgaatcgcaattggataggtaatgtgtgatgaaatacgatttcttccattgttttctcttaaacgttttaaattcgacacaaaaatagcacttttgctttcttgcttgaaattggggcaaagatagatatttctgatgattctgttctcggagacgggggagaaattagttaataatcgtttaaactggagttttggaacgtttattctgacttctgatatgtggaaacaatcagaaggatggaaagaaacttttaaatacggattattcttaacttattatcttgtggaatatgtccacatttctgtggaatttttgcacaggatcgtacttgaaacttaatctggttattaatgctttttttctttattgtaaattgcttatgtatttgaaaatgagtgatataatctctttgattaaacttggaaagtctcgttgtatcagtcttttgttatgcttttggcacataaattgcccaatattgatggtaatctatcctaataactattctaattttagaacaataatggaagtaataatgaaaaacaaatggctattatgcattcttttaatgctgtttctgcctttcggattattcgcgcaggtggctcctcctcttgaagaacagaagacagaagcacaggaagccccggaaaataataaagaagttacgacaaacagcgatactactaccgacggggatgctggaaagacaatcaaaggagtgattaacgacgaacagggagagacaatcattggtgcttccgtcattatcaaaggtgaagacaccggaactactagtgatatggatggtaggtttactctcgaagctccggaaggagcgattttagtgatctcttacatcggctatcatacgcaggaagtgaaagtcagaaagagatctcttcttcgtgttgtgttgaaagaagacaatcagttattggatgaagtggtagtggtaggatacggaactgtcaaaaagagtgaccttacgggtgctgtgtccggtgtatccaacagacaatacaaaaatcaaccagtacaacgggttgaaaatatactccagggtcgtactcccggtgtagaagtcactgctacgagtggtatgcccggagcaagtatgaaggtgcgcgttcgtggaactacttctattaataaaagcagcgatcctttatatgtgattgatggtatcatttcttccagtggcttggacggtatcaacccttctgatattcagtcgatggaaatattgaaagacgcttcctctactgccatttacggttcccgcggttcgaatggcgttattctgataaccaccaaacagggtagtgagggaaaagcacaggtaacattcgatgcatcggtcgggctttcgactgtcagaaaacagtatgacctgctgaacgcctatgaatatgcaactgcactgaatgatattcgcggatcgtccactatctctgccgaagaccttgaggcttataaaaatggaacgaaaggaatcaactggactgatcttctgactcgtacaggtatcacccaggattatcggctcgccatatccggaggaaacgaaaaagtgaaataccttatttcgggaaatgtgcttgatcaggaagccatcacgatcatgtccgactataaacgctatgggattcgggcaaacatcgactcggaagtgaaaccgtggttgacaatctctgcaaaattaaacgcatccagtcttcacaaacacaatgaaggtggggctaactggttacacgtcactaacttttcgcctactatggaactgaaagaccccgaaaccggtgtgtataatacagacccatataacatggtcggctccaacccttatggtgaaatagtagtgaacgatagtgacagctatagctataatttaaatgcgaaccttacattgctgtttaagatcatgaaaggactgacgctttccgttcagggaggttacgattatgacaatagtccttcttattctttcaggtcgaaactggattcaccgggtgccatcaatagtgcgagtaataccagtgcgctgcacaattattggcaaaacacaaacaacctgacctggcaaaagcagtttggcgatcatagtttcaccgctatggcagtatgggagataagccgctcgtgggattcgcaactgaaaggaactggttctaatctgaacaatgaaagtgtagggtactggaatctcggcaatgccgctataagagatgcgagcaattcttatacggaattctctttggcttccggtatcgtacgcgctaattacgattataaaaaacgctatttcattactgccgcattgagagccgacggttcttctaaattccagggagacaacaaatggggatatttcccttccgcagctatagcttgggatattgcacaggaatctttcatgagtaatcagcatgtacttgaccaattgaagttacgtgccagtttcggagttacaggaaaccaggatattgctgcttatagtacgctgggtatgttgtcgggtgcctcttacggttggggaacttccacttcttctacgggatattgggggaatcagtttgctacacctgacattacgtgggaaaagacttatcaatatgatttgggattggacttgagtctcggaggttttaatataacagtggactggtttaagaagcaaacgaaagatctgctctttcagaaacaagtacccaaatataacggaggtggtacctattgggttaatcaggggaaacttaacaatacaggagtcgaaatgtctctcactactttccctgtgaagggcgccgtgacatgggaaaccagtctgaatgcttcttatgtgaagaatgaagtagcagacctcgcaggagatgactttgtactcactgctaactatagcgatttgggaggtcctctgcagattatgaagcccggttatcctatgggatctttctatgtttatcagtggaaaggattcgatgataaaggcgccaatctttatcagaaagcagatggtagtctgacaacgaatccgacttccgatgatctggtcgtgaaaggacaggcaagtcccaaatggacagtaggttggaataacactgttacttggaaaaactggacgctgaatgtctttttcaatgctgccacaggatatgaccggctgaatatcagtcgttttatggcggcatccatgactggagtctctcgttttattaccttgcgcgatgcctacttcaaaggctgggatcatgttgctaacaaagctgacgccctttatccgagtctcactaacaccgataacaagagttatgccaattcagatttttggcttgaagatgcttcttttattaagttgaagaatatcagtctctcgtaccgcattcctcgccgtgtattaaagtttgcaagtgtacaattgtctgtcagcgcacaggatctctttacgatcacccgctataaaggaatggatcccgaagtgtataccagttatgacggactggactatggcgcttatccgattccgcggacgattactttcggtgctaaaatcagattttaaaccacctattaagacaataaccgtatgaaaataacatatacctttataatgaaagttttgcctgctcttctggcagctttgtgttggacttcgtgtagtgatttcctggaagaagatccgaaaggacaattgccttcggatacctatttcagcaacaaggaagatttggatgcttcactgacggctctctattccgtgatagcaagttcacaggctagtaataacctttgtggtacgaacttcttggtgggagacgatatttccactcatccttcaagtaataagcagcctctccgtgagcatgatcagtttgatgtgaaagacaataactcgtggttgtccagtatgtgggaacagcgtttcaaagttatcaaggccgctaattttatcattaataatgcggagcgtacgccggaggtgtcgaaagaggatattaaggtggctattgcacaggcgcattattggagagcctactcttatttttatctggtgacgacttggggacgagttcccattatgctgaaagaagaaatagattataatgctcccttaaagacagaggaagaagtgtacgaactgatcctgtctgacctgaaaatagccgaaaccggttgtcccgcaatgtatacaaaagaaccttatgccagaaacggaatgaatattgccgtaagtgaaggagctgtgaaagcaacaatggcttatgtttatatgtgtatggcggggtggccgcttaataaaggagttgaatattataaactggctgccgctaaagccaaagaagtgatagacggtgcagataatggcacttattattataaactgctaccggaatatagtcaggtatattcgtgggagtacaataataagaatacggagctgctgttaggtatctactataacagggatgcgatggggcaggccgctcctttaactgatttccttcaggatatgaaacaggccggttggggagatacgaatggggaaatcaaattttggaagaactttcctgaaggccctcgtaaagatgctacgtatttccctaaaatcatgtttagcgacgggaaactatatgattggtggtatgataccgatcctgcttctcgtgaagtagtcgcccccgtctttatgaaaactgcagaaggagcggtgcgtggaacagaatttgattatacaaatcctaccgtagtcaatgcgtcgggtgagaaaacattccagttgttacgtctttcgcaagtatattgctggtatgccgaagcgacagggcgtgcgggagagatcaatgatcaggcggtcaaagttctaaacgaggtacgcaacagggcagatggtgaagatactgataaatatacgacggatatgtctcctgataaactggcggaagcggcttacgatgaacatggctgggaaatggcgggatactattggggaggaatcgccagcagagctagggatatgtttagaatgtaccgttataaggatcattttgaatcccgtaagctaaatgagcctattgaggtggcgcacgatgttttcaggaaagaagctgtagcagtcacaggaacttgggatgacagtaagatgtatgttccttatccttatgaagacgtgattttaaatccgaacctggataacagttggaaaaactgacagtatttagtatgacttattgaatgatctgttttttatagaacgatgtagattctcacaatggattacatcgttctttctttttgtatggcttgtggtatcaacctatatcattgttcgatagttaaactcttgtcttgtgtgcgaatagctgatttgaaaggggaatttaaaaacgtcgggctagatttcactaaatggaataaaagtgttatttttgcatcttgttcttaacggaaattaatcaagaaatgatagaagatattaaaaaagcctgtcaggtgatgaatgaaggaggagtgatcctttatcccaccgataccgtatggggtataggctgtgatgcgactaatgaagaggctgtacgccgcgtgtatgagattaagaagcgcgctgacagcaaggctatgctggtcttggtagactctccggttaaagtagatttttatgtacaggatgtgcctgatgttgcatgggatttgattgaagttgccgacaagccgttgacgattatttattccggagcacgtaacttagcatcgaatttgctggccgaggatggtagtgtagggattcgggtgacgaatgaagatttttccagacgactctgtcagcagttccgtaaagcaatcgtttctacttcggctaatgtcagcgggcagccgggtgcggctaattttagcgaaatcagtgatgaaatcaaatcggcggtagattatatcgttggctttcgccaggacgatatgagccggccgagaccctcaagtattattaagttggaaaaaggtggagtgataaagataattcgcgaataaatgaagggagaaaaacttagtttattacagcgttgcatcaaatggcgggaagcgaatataaaggagaagcaatttattctgatattaagtttcctggtcggaattttcacagcgtttgccgcattaatattgaaattctttatccatcagatacagaatttcctaactgataattttaatgcaacggaagctaactacctgtatttggtatatccggtagtcgggatttttcttgcaggttggtttgttcgtaacattgttaaggatgacatcagtcatggagtcaccaaaattctatatgctatttcccgtagacagggacgtatcaagcgacataatatctggtcctctaccattgccagtgcgatcaccatcgggtttggtggatcggttggagcagaggcgccgattgtactgacaggttcggcaatcggttccaatttagggagtgtattcaagatggagcaccgcacgctgatgttgctcgtcggctgtggcgcggcaggtgcgattgccggcatttttaaagctccgattgcgggattggtatttacattggaagtcttgatgatcgacttgaccatgtcctctttacttcccctgctgatttctgccgtgacagcggcaaccgtttcatatataatcaccggtacggaggctatgtttaagtttcatttagatcaggcattcgaactggaacgtattcctttcgttattttactgggaattttttgcggactgatttcattgtactttacgcgtgccatgaattcggtggaaggtgtctttggtaaactcaacaacccttataagaaactggctttcggtggtgtgatgttgagtatattgatcttccttttcccgcctctttatggtgaaggatatgataccattaatcttttgctgaatggaacgtctgcggcagagtgggatacggtcatgaacaattctatgttttatggttatggcaatttgctgctggtttatctgatgctgattattctgctgaaggtctttgcttccagtgcaacgaatggtggcggtggttgtggtggtatctttgcaccttcgctttatctgggatgtatcgccgggtttgtcttttctcattttagcaatgactttgctttctccgcttatttgccggaaaagaattttgcattgatggggatggcgggagtgatgagtggcgttatgcatgctccgttgacaggagtgttcctgatcgctgaattgacagggggatatgatttatttcttccgttgatgattgtatctgtaagttcatatctgaccattatagctttcgaacctcatagtatctattcgatgcgtttagctaagaagggacagttgcttacacaccataaggataaagctgtgttgacgttgatgaagatggagaatgtggtggagaaagatttcgttgtcgtacatccggaaatggatttgggcgaattagtgaaagcaattgctgcttcccatcgaaatgtcttcccggtgacagataaaaaaacaggtgaattgttaggtattgtacttcttgacgacattcgtaacattatgttccggcaagaactttatcaccgtttcactgttaataaattaatgacatctgcccctgccaagatattcgatacggatggaatggagcaggtgatgcagacgtttgatgatacgaaagcctggaatcttccggtagtggatgaagaagggcgatatcagggatttgtttctaaatcgaagatatttaattcataccggcaagttttggtacatttctctgaagactaaccgacaatcggcaagatgccggagccggggttatgcagataacaggttgctatgcagattataagacgattatgaaaaaagaagatttaagaatagtatatatggggactcccgattttgcggtagaggccctgcgtcaattagtagaaggcggttataatgtagtgggtgtgattacaatgcccgataagcctgccggacgcggacataagattcagtattctcctgtaaagcaatatgcgcttgaacaaaatttaccgttacttcaaccggaaaggttaaaagatgaggtttttgtagaagcattgcgtgaatggaaggcggacttgcagattgtagttgcttttcgtatgttgccggaagtggtatggaatatgccacgactgggtacgttcaatcttcatgcttctttgcttcctcaataccgtggagctgcgcccattaattgggcggttatcaatggtgatacggaaacaggaattactactttctttttgaaacacgagatagacaccggagaagtcattcagcaagtacatgtacctattgcagatacggataatgtggaagtggtacatgataagttgatggtactgggaggaaaactggttcttgaaacggtagacgctatattgaatggaacggtaaaaccgattcctcaagaagaaatggcggttgtcggtgaacttcgtcctgctccgaagatctttaaagaaacctgtcggattgactggaatcagccggtgaagaagatatatgattttatccgtggattatcaccttatcctgctgcctggagtgaactgattacttctgaagaaggagcagcagtggtcgtgaagatatttgaaagcgagaagatttatgaatcacatcaattagctacaggaacaattgtgaccgatggaaaaaaattcatgaaagtagctgtaccggatggatttgtatctattctttctttacagcttcccggtaaaaaacgtctgaaaatagatgaattgcttcgtggatatcacctggaagatggttgtctgatgaagtaattaatcggatgagcagaataaaacgagcaagccattagattataaatagaataaaacgtcccgaataagagacggctagaacctaaaataaaagaattatgaaaccgattatcgctccttccattctttctgccgattttggatatttggcaaaggacattgaaatggtaaaccgcagtgaagcggagtgggtacatattgatattatggacggagtatttgttccgaacatttcatttggctttccggtactgaaatatgtggcgaagttaagccagaaaccgctggatgtgcatttgatgattgtgaatccggaaaagtttattccggaggtaaaagcgttgggcgctcatacgatgaatgtacattatgaagcttgcccgcatctgcatcgggtgattcaacaaatcagagaagctgggatgcagcctgctgtaactatcaatccagccactcctgtagctcttttacaagatattatccgggatgtatatatggtgcttatcatgagcgtgaatccgggatttggcggacagaagtttatcgaacattcagtagaaaaagttcgtgagctgcgtgccctgattgaacggacaggttcgaaagcgctcattgaagtagacggtggggtgaatctggaaacaggtgcccgcttggttgaggcgggagccgatgcgctggtggctggaaatgctgtctttgcggcacccgatccggaagcgatgattagtcagttgcacgaactgtaactcatcagttgagtactttttacatccatcgatatccctatatacgcctgattatcccttggataacaggcgttttttgtggagatcatttttttgaccgttcatgggaacttttttggagtattctagcccttggactttgtattgctttattatttgtgctttatttcctgaaacgccattctttgcgatggtgttttggattagcagtctctatcctttgttttataggaggatggcttggaataacttggcaattacaacacgctgtctactcttttccggaagaagaaacagtgtatcgggttttaataacggatgcacctcaagcgaaagaacatacctacctctgccagacattattaaaggaacgtcgtgatactgccggcacatatccgatagaacgtactgcaatcctttatctacagcaagattcggccgtcacccggttgaaaagtggagatgaactgctgatttctgcccgtatttctccccctctcaacaatcggaactttgatgaatttgattatgcccgcttcctgatgtggaaaggaatcagtggaacaggatatgttgcatccgggaaatggacaaaacaggacgggatgaataaccttgatctcaaaagtatagccagctcttgccgaagaaggatgatctcactttatcagaaactgggattttccggcgatgaactggctgtactttcagcactgaccataggagacaaaacggaattaagtgattcggttcgtgagagttattcggtggccggtgcaagtcatattctagctctatccggtttgcatatcgggcttttatatacactgctctttttcatactgaaacctattgcccgaagaggaaatataggtagagctatacgttctgttcttcttcttatcctattatgggcttttgcctttttcacaggactttctccttcggtagtacgctcggtcagtatgttttcaattttagcaatggcagatatggttggtcgccaaccgctatctctaaatacattggcggcagctgcatggttgatgctattctgtaatccggcatggttgtttgatgttggtttccagctctctttccttgctgttgcttccatcctattgattcaaaaaccaatctatcacctgattacggtgaaaggtagaataggaaaatatatttggggactgatgagtgtgtctgttgctgcacaaataggaacggctccgcttgtcatgttttatttttcccggttctctgtacattttctattgacgaacttggttgttattcctttcattacgattatcctgtatgctgctgtcattatgcttcttctgactcctctttcgtggcttcagatcgtagtggccgaaggtgttaagaaactattggaaggacttaatttcttcgtccgatgggtggaacagcttccttacgcttctatagatggaatctggctttatcagtcagaaatattgggtatctatatcgttggctttttgttaacctattatttcatgaaccgtcgataccggaatttattgatttgtcttttttctatcttattactggggacttatcattcaacattatattggctagatcgtccccggacaagcctggtcttttataacgtgcgcggttgccctgcagtacattgcattgagagcgatggacgttcctggataaactatgtagatactatctccaatgaaaaacgtctgaagcgcatggctgctaactattggaagcatcatcatcttctgcctcccaaagaaataactgccgattgccggtatatggaacttaatcgtcagcagcagattatatcctatcatggctgtcatatttgtgtaataaatgataaccattggcggaacaaaaccaccgtttctccgttatatattcagtatctttacttatgcaaaggatatgacggacatctggaagagctcacccgaatcttttctttctcttacgtcatattggacgcatctctctcggaataccgcagacacctccttgaaagcgaatgcaagcaatccggtctgcggtttatctcgctatccgacgaaggttctgtccgctttttgctctaagtacaaagatttatcgtacatttgcaccttgataaagtataagagtatgttgacgaaagtaattgaacaagccaaaatagaccattttactaaatggtttgaacgagctgacaaaatagtaattgtatctcatgtttctcctgacggcgatgctatcggttcttcattgggattatatcattttttagattcacaagagaaaacagtaaacgtaattgtgccgaatgcttttcccgattttctgcggtggatgccgggcagtaaggatatcctgttgtatgaccgttacaaagactttgcagataaattgatcgccgaagcagatgtcatctgttgcctcgatttcaatgcactgaagcgtatcgacgatatggcagatgctgtggccgcttctccggcacgtaaaataatgatcgatcatcatttatatcccgaagatttctgtaagatagtaatgtcctatcccaaaatatcttctacttccgaactgatattccgtctcatctgccgtatgggatatttcagtgatatctctaaggaaggcgcagaatgtatctacacagggatgatgacagataccggtgggttcacctataactcgaacaaccgggagatttattttatcattagcgaactcctttctaaaggaatcgataaagatgatatttatcgtaaggtgtacaacacctattcggagagccgtttacgtttgatgggatatgtattatcgaacatgactgtgtattcggaatctaattcggctctaatcaccctgacaaaagcagagcaaagcaaatttaactatataaaaggcgatagcgaaggctttgttaatattcccctttccattaaaaatgtctgtttctcttgcttcttgagggaagataccgagaaaccgatgattaaaatatcccttcgttcagtaggaaccttcccatgcaatcagttagctgccgaattcttccatggaggaggccacttgaatgcttcgggcggtgaatttttcggaacgatggaagaggcaaaagcggtctttgagaaagcgcttgagaaatataaacctttactaacagcgaaaagctaaagatggaaggttaaaagtgaatatggaaaggttaaaagatacgaactttcaacttccccctttcaacttttaatgattttgagatacatttgtgcggaatatagctaaataacagataatgaagaaacttgtatttttatttctctctttgttaaccgccggaagtctgttccaggcatgcgacaattcgaagacttatgcagaaatgctggaagacgagaaaaatgcggtgaataagttcatcaaagataatgatatccgtgtcatttcactggaagagtttgaacgggatacgattacagcttctaaagaagcggggaatggatatgacgaatacgttgctttctccaatggcgtatatatgcagatcgtagatcgtggaggaaaagaggataagaatggagttgaagttattaatgaggtagatacttttgctaacaataatgtcatttgtacccgctatgtagaacaggatatgatgacaggagatactacatgtttcaatgttcctttggaaaaatggatggatatttctgaatattataagtctccattaacattccgttatgtgcaaaactcatctactgtttatggaatcgttttatctggtgattttgattatgactatttgtggacagttgctaatggttatggaactgcaattccatccggatggctgattgctttaccatatttgcgtaataatgcccatgtacgcctaattgtaccttctaagatgggacatacaactgcacaacaatatgtcaatccttatttctatgatatccggaagttcgagaaagcaaaaagctaaagcactaacattagataaatcaaatctttaactaaagaacctatgactctaatcaaatctatctctggaatccgcggaactattggcggaggagcgggagaaggactgaacccgcttgacattgtaaaattcacctcggcttatgctactttgattcgtagaacctgcaaggcaaagagtaataagattgttgtgggacgtgatgcccgcatttccggtgaaatggtaaaaaacgtagtggtcggcacattaatgggaatgggctgggatgtagtagatattgatcttgcttctactccgaccacagagcttgctgtaactatggaaggcgcttgtggtggtatcatcctgacagcttctcataaccctaagcagtggaacgcactgaagttactgaatgaacatggcgaatttctgaatgcagctgaaggcaacgaagtgcttcgtattgctgaagcagaagaatttgactatgccgacgtagatcacttgggttcttaccgcaaagacctgacttataatcagaaacatatcgacagtgtattggctctcgacttggtagatgtagaagctatcaaaaaagctgatttccgggtagctattgactgtgtaaactcggtaggcggtatcattcttcccgaacttcttgaacgtttaggtgtgaaacatgtagagaaactctactgtgaacctaccggaaacttccagcacaaccccgaaccgcttgaaaagaacctcggtgacatcatgaacttaatgaaaggtggaaaggccgatgtagcttttgttgtagaccccgatgttgaccgtctggcaatgatctgcgagaatggcgtaatgtacggtgaagaatatacactggttactgttgccgactatgtactgaaacatacccccggtaacactgtttctaatttgagctctactcgtgctttgcgtgatgtaactcgcaagtatggaatggaatacagcgcttctgccgtaggcgaagtaaatgttgtaacgaagatgaaagcaaccaatgccgttatcggcggtgagggaaatggtggagtaatttatcctgctagtcactacggacgtgatgcattggtaggcatcgcattattccttagccatctggctcacgaaggaaaaaaggttagcgagctccgtgctacttatcctccttacttcattgctaaaaaccgtgtagacttgactccggaaatcgatgtagatgctatccttgccaaagtgaaggaaatctataagaacgaagaaatcaacgatatcgacggtgtgaaaatagactttgccgacaaatgggtgcatttgcgcaagagtaatacagaaccgatcatccgtgtgtatagtgaagcttctactatggaagctgccgaggaaatcggtcagaagataatggatgtgattaatgaattagcaaaataatatcctgtaaaataggattttatttataacatttgagtctcgtatatcataaagataactgaataagttgtctcattgatatacgagactttttattaggatgatatccactgaataatgatagttactcttctccttgagtattaacaataaagtttcttttgattaagtctaaacttcctttcgtccaatagtaaacttctcttttgttatttacaaacttaaaatgcaagcttcatttttataaatgcaagttttgtttttaaaaacggaacctttgtttttataaatgaagcttgcatttatagattggaagggatgaaaagcaactttactgttaataaaaagaaagtttggacttaatcaagagcaacttttctattaatagattacatgagaagtaagcagtattgagaggaaactaatctatatagcttacttctctacttcgttagaatagatatagtataaggaggttagtgatatacaaaggtttatagatcttataatcaatgataaataaacggcttatatatgtagatttgatatgtgaaaaggataattaaaggaaaattgtagtatatttgtactgtcctttaggacgtttttattataaggaagcgtttagtgctttttctcaagtgcgaatctggacaattcgagctgtgttgaggaaataaacaaaacgttctccctttggtttgtatgttgcacctaggtgctgatatacagtcaagggcgtgagctgtttttgcttgtattcaacacagaggtagtccagaacctgcacttggatataagtttagcggtctcgcgcttcttttgtgtatacacttctgttgagactaggaaggaactaacaaattgaaaaacatgcaaacggtacaagtgttgccagtaatgttactaatgtccgtaacagtatcagcaagaggcctaacaggttttgaacagcttattgataaacgtacgacatgaaaataaaactgatagcattatttataatgatgagatcattggctgctatagctgacaatgatacttatttcttttcaaaagtagattatcaacaaggcttatccaatagtgcagtgctttgtctttttcaagataatgtggggctgatgtggtttggcacgtatgatggagtgaactgttgggatggaaagacgatggaagtgtttcgctctgatttttcagaaagcaaaacgttgagcaataacgtgattcattccatttcgcaggcagataacagttgcttatggatttctacccatttgggagtaaaccgcttctcgcaaaaggcgaggcaagtggtagccaactatgatttttcaggtgattattatgttcattctaataatcagggaaacacttggatacttaccggagacggaatttactattataatacgcatcatcaacgttttatccgggtacaaacttctgttttaccagtggatagtatggaacgacgtgcatttgtgaccgatgatggggggctttgggtatttccacctagtacgggacaaattcttaattactcactcaataggtttgatacggatagtttgtcggtgaaattatctatctcaacaaacaagttccattcgaaagcaattgaagatattttctatcagaatggtattttttgtttcgtagattgtgacagagatttatatatgtatgatatctctcgtaaatccaagatttatattcgtaatctttcatcactcgttcagaaatatggagtaataacagggattgttcccttttatgaagatattatcattggatttcgtgctaatggattgattcgtttacgtacttctaaaaagtatgaagaagagatcgtcaatcgtaatatccgaatctatggaatttatagggaaccgcgtcaagggttgctttggattgcatcggacgggcagggagctgtgatgtacgccaaaaaatattcgatcgctaccaatttgatgttgaatcgtatgtcacctaatttgagtagacaagtacgttcgatactgacagatgaatatggaggattatggtttggaacaaagggagatgggcttttacatttgcctgattatcatgaagcagtaggaaatcctcttgggagggctatggtttattctcctggagagaaacaggtaatgtcatcatatattaaatggaatcatgagtttcacgtttataaactggcccaaagtcgctatatggatggcttctggataggggcaggaaatccgggattattttattattcattcagagatgatgctgtgcattcggtagaatattcttccggtcgacctgttattgagatacatgatatttatgaagaaaatgatagtgtgttatatgctgtaacggcggtggatggtttttataaaatggtgcttgaaaagaaaggagggactattaatgtacgtcagcaaaaacgttatcatttttttcatgagcaacgggagattatgatgttttatcccatgttggcggaaggggattctatcttatggttaggtagtcgtgaaaaaggacttgttcgtttcgataaacgaacggaagaatatcaagtcatctctttgaaagaaaagctgcgcaagtcggtagacgatatattaagtttgtaccgcactgaagatggtaaaatgtatgtaggaacaacttctggtttggtttgtctttcattttgtggaaagaagatagaagctacttatatcggtagggagcagggacttcttaatgatatgatacatggtatacaggaagatggcaatggcttcctttggctgggtaccaatcgcggactcatcaaatataatccgaaaaatggctcgtcgcatgattattattacagtgccggtgtgcaaataggagagtttagtgatgatgcctattatcagtgtccttatacaggcagtcttttctttggaggaattgatggactgctttatctggatcgtaaagtggcggctgcccctgagttttatccggatattgtgttacgtcggttgtggcttgggcggacagcagtaaatttaggtgattattatacggaagatggaaaaagtctgcaattggaaggagcggaaacttctttctctctttcttttaccgtacctgattatttgaccgggaaagaagtggaatattcattcatcctggaaggatatgataaccaatggacttcattcagcagcatcaatgaggcttcatatactgatgtgcctgcgggtgattatatttttaaagtccgttataagaaagacgtgttcgatacggagtataaattcttttccattcccatacatattcttccaccgtggtatcagtcgctatgggcttatctcctttatattttattaatagtgctctttgtggtttatttgtttcatttacttcgtaaatatatccttcatgaacgtatactgaaacggttgctcaatacggaaaataataaaaaggtgctggaaagtagtagttataatcgtgacttattggatagttttaccctcatttaccatgcttgcgatcagctacgtgcagaaaacacctcttatgaacaacgtcgtaagcaagtggagttaatacgtgaaacagcgatgagtgctcttttccggccagagacgctttattcagagaaactgaagcatttttatcctactacctttgttttgtctgcccgtatgtgtatacaggagttatctatggaagtacttcgcacgttgaagtcagaaggagtagatgttactttggtacaatctctgattcctgcgaattttacttttccggtctataaaaatgctttacgttgtattctttattattgttatcagtttgtttgtcagaaaacatcgtcaggcagaattacggttagtgtgcaggaagaaaacggcaagatgtcgttaataatatctggtacggttgaggtgcttaaagaactacaacaacaactgaccggaactccttcctctgtgtttaataaagaagatattgatcggtttttcggtattcagttgatgctttgttttgtgcaatcagctttagagcaacttcatacagttgttcgttatgtagaatctgacagtggccaacatagcctgatgcttactttcgatcccgccacattaattgaaaatcaatcgagtgaaaagaaaacgattcttttattagaagatcgtgaagaaatggtttggttgataacaggattactttctgaagaatatttgatacattcggtgaaaagtgtacaggtggcatttgaggaaattcatcgttcggttcctgctgtttttttagttgatatggctatgtatgcggaagaggaaagtacgtttatggaatatgttggaaagaatcgctcggctttatcgaaaacagcttttattcctttgctgacatggaaagcaagttcggttattcaacgcgaattgattaaatggtccgattcctatattgtactaccctatgatattctctttctgaaagaagatgttcataaagctatttatggtaagcgggaagccaaacaaatttatttggaagatttgggtgaattggcagggcaaatagtgtgtactacagcagaacaggctgattttatccgtaaacttttacaagtgattgaacagaatcttgaagaggaagaattgggttcaacattgatagccgatcgtatggcaatgagtccgcgccagttttatcgtaagtttaaggaaatatctcccattgctcctagcgatctgattaaaaactatcggatggagaaagctgcgcgccttttaagagaggaagatctttctattcaggacgttattgctgatgtggggatatcaagtcgttcctatttttacaaagaatttgctagaaaattcggtatgacacctaaggattatcgagaacagcataagaatccgtagttttcttgtactttatattgtgcgctcattatacacaatatattgtaacacattgtaaatgtcttgtttataatgtgctcccattgtacatgttatgtgtcttttgaccaatgtgattttgccagcattttgtcatttcagaggatgattaatgagtgaaaaagtgtttaattcgctttgtacttagccattgaaggataagtattcaacagaatcattaattaagaaatcatgaaacaaaactgcattaaaactgtagcaattagtttgctcgtaacattgtctttgtcaactaatgcctctacgaggaaggtaaatgtcgcgcgtagcgttatggtaggaaatggaattgccaaatttgtacctgatggctttgatgccaagaaagtatcttcttttgcaattgaaaaagaacctcgcgaacagggagcgctttcttccgggtgggagctggttcccgatttttcactgactgacggtaaagcgaatgcatcattaatcataccggaaggtacgagtatctacggaggcggagaagttaccggatctcttttaagaaacggaaaaaccataaaactgtggaataccgattccggagcatacggagttgataatggaacgcgtttgtatcagtcacatccatggatgatgggagtcaggaaggatggaaccgcctttggtattttgtttgatactacttggaaagctgaattaagcagtacagatgagaaaatagagttaagaagtgaaggggagctttttcgtgtatttatcattgacagagaatcaccgcaggctgttgttcgaggattatccgaactaaccggtactatgccgatggttccgcgctgggctttaggctatcagcaatgccgtttttcttatacgcctgacagtcgtgtaatagaaatagccgatacgcttcgttacaagcgtattccgtgtgatgcaatttggatggacattgattatatggatggttatcgtatattcacatttaacccgcaaggttttcctgatccaaaagctgtaaatcgagacttgcatctgcgtgggttccattcggtatggatgattgatccgggagctaaagctgaaacaggttattctgtctatgattcgggaacagcaaatgatgtttgggtaaaaactgtagatggaaaagaatataacggtgatgcatggccggggaaagtggcatggccggatttcacagatcctaaagtttgccagtggtggggcggactttataaagactttatggcgcaaggcgtagatggggtttggaacgatgtgaacgaaccgcaagtgagtaatacacctaccggaacgatgccggaagataatttgcatagaggtggaaatggaattcctgccggaactcatttgcaatatcataatgtttacgggttcttaatggttaagtcatcaagagaaggaatgttagccgcgcaacctaagaaacgtccttttattctgactcgttctaattttttgggagggcagcgttatgccgcaacatggacaggtgacaatggttccagtcgcgagcatatggagatgtctgtacctatgtcgttaacattgggactgtcgggacaacctatgagtggcgctgacattggtggcttcttgttccatgcagatgccgatttgtttgggaattggattgcactgggagctttttaccctttttctcgcggtcatgcttgtgccggaaccaacaataaagagccttgggcttttggaaaagaaatagaagaggtttcccgtattgctttggaacgcagatatattttgctaccttattattatactcttttgcatgaggcttccacaacaggtatgcctatcatgcgtccgatattctttgctgatccaaaagatctttcgttaagagcggaagaaaaagcatttctggttggtgatgacctgttggtaatcccttcatttgctaaaaaaacggcgcttcctaaaggaatatgggaggatttgtcactagtagacggggataaggatggtaaatatcaggcaaaattaaagattcgtggtggttctatcattcctaccggcaagataatacagaataccactgaaaattcactggatcctttgatgcttttggtctgtttggatgagcaaggcaaggcttccggaagtatgtattgggatgctggagacggctggtcataccaaaaaggtgattatagtttacaacagtttacagcagaacgtaatggtaacaaagtcatggtgaaactggttggaaaaacaggaaaaagagaactggagaataaagggatggcaattgtcaaggtgataactaaacaaggtattcgactggctagtggtaatctgacagaaggtattgaagtcggattgtaaacaggctaccacctcgttgggaaataataaatgaaaaaatatatggaaaagataattggtatattgatagttctatttgtggttgggactaccatgcagtcgtgtagtgaagatagtaaagaagaggaaaactttctccaaaaaattgatccggtggagcaactggaagtgttgaatacaaatagggagaaagagctggttgtgaattttgtgaggaaaacctatgtgaaagatctccagatagaaatagcttatcggaggatagacaccggaaagacgcaggaatggagcattgttttattaaatggtaatgatgtcaaatacaaaaacggagcaaattatttgctacaagtaccttcagagggaacgtatgaggtagcggtcactttagtgggagtcaatggtttgcggtcggagagtaaaagtcaggaagcggcaacctttgaatatgcacaaatgaaaatgtttgattgtgctcataccttgatgacaaaggttatagagtattattatcacaaggggcctcggacgtgttggcagacatggtatcctaaggctgacggttattgggatggagacgcacttgtatggggacaaggtagtggattgtctgcgtttgtggcaatgagagaagcttctcttggtacggggcaggaacggcactatgagtctttggacaatgatatgttcagtggtattcaggctttttggatagcagatcgtggacgtactgcatatagtgtgtatccggcagctggcaacgagcgtttttatgatgataatgtatggattggacttgatatggcggaatggtatattattactagagataaacgttatttgactcaggctgaggctgtgtggaattatttggcacagtatgggtgggatgaaacttgtggtggcggagtacattggagagaattgaacgaacctagtaggtcgaagaatacttgttctacagctccgacaggggtattgagttgtattttatatcagttaactaacaaacaaatttatttggataaagcaaaagagtgttttaactggttgcagacttatatgtatgatcctagtgatcatttgtattatgataacgcttctcctaaagatgatgatcccactcaggtaggtaacatagagaagaataagtattcttataattctggtcagcctttgcagttggcttgtcttctttataaaataacgcaagagaattcttatttgaatttagcaaaacaaatagcggaagcttgtcacaataagtggtttaaacagtttcattcggatattttgaaacgtgattttaaagtcctgtcgcccggacacgcatggtttaatactattatgtgtcgtggatttttcgaactctactccattgacaagaactcattgtatttggaagatatacatagtacgatgttacacgcctggtttggcaaagcacatcataataatggattgattaataatgaggatttgagtggtttaagtggagatattccgacagaagacggtggcaataaatggcagattctacatcagggtgcacttgtagaactgtatgctcgtttagctgtatgggaaaaaaaacagaattgattttctcgtcggcaggtatttggaaaaatatctgccggcaagttatatattcttaggcaagtcgtttattattatagctagtctttttacgtctattaatagtggagtcggtaccttaccccattttgttcgggtttgaaaagagaatacagatttgaattaatacttttctcttgtgttctcttattgttctcttattctgcttagtggtgcttaatgtgttgaatatgaggactttattttgtgctcttattgtgcttgttgtgcgcttctttgtcaacgaaattttgtcttcattttgtcacgccagagtatatgtaataggtgaaaaagaacttattttgctttcgttaacaagaaaaatatatgcatagttaagaatacaaatgtatttagtaaccttaataaacaagtaaaatgaatgtatttagaatgaaaaaacatcacgcgaaatcgttgcggtggaagatgaacaccgattcttttcttatgaagagtggatttctattttcaattttattattgtcgttttgtgctgctagctgttcagatgatgatgaacaaggaaaaggaagagctttctttcagacttattgggcattagatgccaataattccagtatgccttgtggcggaactctttggactcaatattcggatgcacctgttgggtcggaagttggaaagttagtagataatgatttagacacaaagtacgttacttatcatagtaatgtgaatataaattggaatggaaacagtagtgtctcagtaaaatcctattcacttacatcggcagctgattctccggaagcagatccgaaatcgtggacattatccggttcttctgacaatcaaaaatgggtagtactggacactcagaaagatcagactttcgcagaacgaaaacagacgaaaacgtatgctgtagaaaatgaagaagaatatagatattatagattgagcatacaaagtaatcatggggcaagttctactcaactcgcagagttgtcattggcagcatctgctttcgttggagacattgatgatttgatgtcgaaatcttccggaagtacgtatagtccggataatgtgatgggtactcagcatgccgagtcggatttgtccgttacgcaggaaaaattgctgtggttgaaagatccgaataaagaaccggatccttttgccggattgagttgggctggtttccaagtctccaatctttatccttttggcgaaccttgtccggcagatgtaaaccaacattccattggtgactgctgtttgtgtgcggtgatgggttctttgtcttacgtttatccgggatttatcaagaatattattaagaataatggcaaccagacatttacggtgaagctgtacgatccgaaaggacagcagatcgaagtcggagtaagtaatctgttcgtgggtacgagtggaagtttgggcgcaagttccggcaagagcggtcagcccacatggtctacagttcttgaaaaggcagtcatcaagtggtttcaagcgtttagaaacacgtcggacattggcggtatcggttcggaatatgcagcagctatcatcaccggtaatggctccagttttgcttttgctccggaaaaattaactcctgccgagctgcaacgtgccgtgtcggtttcactgaagagaggaaaactggtggtaggaggattcactaaaagcgatgttcctgtcgacggtaagtataaaactgtttctgcacatgcttataccgtgtctttgcctgtggatgatacgatgcttttcgtcatgcgtaatccatggggtgcagtgcctactattagtggtggacatgacgggacgggcgacggcatgttgttcatcaaggatgataatacggttccgccgcttatcgatctccgtataatggaaccgggagcagcagaagaatttggagtaggaggaaatttatctccttatacaccgccttcttatactccgatgccaatgcgcatcgctcctcatttattaagaactggaaggtagtttgatttaatatttgaatatactcatatcctgtaaaacgcaggactcaaaagatcttatttatatgttaaacttaaaattaatattaaccttaattatacattaaagtatgaaaaatgtaattcaaagcattttgggaacattcttttttgcttctctagctgtcccggtttggagtttgccaactgatggtatggctgcatctttgcgggaagcttccgtagagagtactttggaagtgcaacagcagaaaggagttcgtgtaacgggaatggttactgataaggataagaatccattgccgggagtaacgattgttgtagctaatgttgcaaacccttcgggggcagtgacagatgttgacggtttgtttcaaataaccgttccggccaaaaattctacattggagttttcttatattggatttaagaagaaatctgtttcgttaaatggatcgaagttactcaatgtagttctggaggaagacgcttcggagttggaggaagttgtaattaccggttatggtagccagaagaaagcgtctatcatcggttctattgagacgattcaaccacagcaactgcaatttggtacaagtcgtacattaagtaacaacttagcgggtaagttaagtggtgtaattgctattcagcgtagtggtgaaccggggtatgatgattctaacttctggattcgtggtattagttctttttcgggcagtaattctccattgatcttggtggatggtattgcacgagatcttaataacgtagatgtagccgagattgaaagtttttctattttgaaagatgcgtcggctagtgccatgtatggtgtacgtggtgctaatggtgtaatcgtcatcacaacgaaacacggtcaaattggtgcaccccaggtaagagtacacgtagaacattctattaatcaacctaccaaattcccagattttttggatgcaccggattatatgacgttactcaaccaactggctgcacaggatggagcgatattaccttttgatcaaacgcgtattgatcgtacccgtagcggatatgatcccgatctttatccgaacgtaaactggattgatgcaattacaaaagattatgcttacacaaccaaaggtaatttggaggtaagtggtggttctgatttcttgcgttactgtatcgtagcttcatattttaatgagtcgggtattctgcaacaagataaaacattgccggtagataattctacggacaataatcagttcaatatgcgttcgaatattgatatgaacgtaaccaaaactaccttgatgcgtgtaaatattggtggttttctgaatcgtttcaggaaacaacgttgcagcacagaccaagctttttccgaagctttcgagactttaccttttgtgcacccggcacgttatagcgacggttccattcctcgtgaaatgaatagagctaacccgtggaggactgcgacgcagggagggtatgacttcactacctcgtccaagattcagactttattttctgtagaacaagacttgagacagattacgccgggattgaaagctaaaggtatcttcagtttcgaccgttggaacagtagcaggaggtcgcgtaccagcaatactcctaccgtacatccggcgacagggcgtgatgcagaaggtaatttggtgtatacgtcgtatgatgtgggcgatgaatcaatgggtagtgaaaccggcactgaatatggtaataccaatgtttattttgagtttaacttgaattatagccgtaagttcggaaagaacgatattgatgctttgcttctttataatcaacaggcttatgacgacggttctattcaggattatcgtaaacaagggtttgcaggacgtttgtcttatacatacgatagccgttatgtagctgaattcaacttcggttataatggttcggaaaatttcgccaaaggtcatcgtttcggtttctttccttccgtagcattaggttggttgatgagtgaagaaccgtggatggagcctttgaaaaacacttttgataagattaaattccgtgctagtatgggacaagcaggtaacgataatattggtggtcgtcgttttgcttatttgactacactaaaaacagatgccagcggatatacttgggggactacaggacaaaagaactacgataaaggtattacagaaggcgagattggtgtgacaaatctgacttgggaaacagctactaaatcaaatcttggtctggaagttggtttgtggaacgcgttggatattacagtagatgttttccgtgaaaaacgtaagaatatctttatgcaacgtcgtattattcctacacaaacaggttttatcacaaatccttgggctaactatggaaaagtaacgaatggcggtatggaggtttcgattaatttgcacaagcaacttaataaagactggtttacatctttctatgggaattttacttttgccaagaatcgtgtagacgagtatgacgaggctccttctaaaattggtacttatcgcggacagacagggcgctctatgaatgaactttgggggcttaccgctgaacgtttgttcactgcagacgattttgagtctgatggttcattgaaattcggtattccaaaacaagaggtgggtgctgacaaactttatccgggtgacattaaatatgttgatatgaatggagacggtaaaattactgaagaagacgaaggttatattggcggaacggaagatccgcgtatcgtttacggttttggcggtgttatagcttataagaacatagattttaatttcttctttcaaggtactgccgacgctcatcgtgtgattggtaattcaaccatcttcttgccaggtagtggtacaactgtgcaggggaatgcttattctgaaaatctggatgatcgttggacggatgataatcaagatccgtatgctttttggcctcgccttacatatggtcctaacaagaacaactatcgtgcttctacttggtggaagaaggatatgagtttcttacgtttgaaaactgtagaaatcggatatactttcccgaagaaatggatggaaaaaatttactctaagggggcgcgcgtatttgtcagcggtaacaacctcttatgtttctctcctttcaaattgtgggatccggaacttggtactaataatggtttgaaatatccgatgaaccgttctattttgtttggtattgatattaatttctaaactaaacctcaaaaacaattttatgagacatctcaatttttcaaaatatatggtagcgggtcttatggcggcttcgctgcttacgacaaatacttcgtgtgcagattatcttgataaagaacctgacacggaactggacatcgaaatggtgttttccaatagagataaggtgtatcaatggttggcttttgtgtacaacacaattcatgagcctgataaatggcgtatctggaaagatggttacgaagtgtttgctgatgacctgactccttcaaagcgctgggagcaatgggatggtaaaaccaccattcctaaaatctttggtgaatggactgtcaattcgacatgggatggcgatttttggcgtatgatgccgcaatatatccgtcacggatatatttttcaacaacgtgcctatgctttgccggatagtgatttgccacagagtgaaatagataatatgaagatggaagttaagttcctaactgcttatgcttggtggcagttggctgaaaactatggtgctattccttttaaaccggattatatcacccctagtgatttcaccttgtctgatttgatgattggacaaagtccttttgatgaagtagtagattattgtgatcaacaaatgttggaggccgcaaatgcactgcctgctatctacgatgatccttctaaatatggtcgtatcaataagattatggcactgactgttcgttctcgtatgttattgtttgctgctagccctctggttaatggtaatgaatggtacaaagattatcgtaataaagcgggggaactggtattcaatccgacttacgatcccaacaaatgggtaaaagcagccgaggcttgcaagctttgtattgatgaagcggaaaaagcaggatacaaactgtatgttgaaacaggtcctaccggtgagaacgatccattcatgtctacctataatgtccatatcaagaaatggagtgaaggaaaccgagaaattactttcccggtaacaaaaggaaacggttactttgattttttcctttatggagcttccacacgtgaattcagtggcggtggtggtcaaggagtctatcaaggattggttgatgcatttttcacaagaaggggattacctattcttgaggatgaatcttattcagaaaagggattctcggaaaatgtagataaacgtaatactagctggtcttatggtaccggtaaagagggagaaataactgctgccggaatctataagatgtattgcaaccgcgaacctcgtttttataatgctgtttctttccatggatcttggcaagaatgtgcgaagcgtccgtatgacttcttctacaacggaaaagacaatattcgtaccagctcgcctcatgatgctcctcaaaatggttatttggttcgtaagagtctttgtatgaccgataacaaaaaaacaggtgtatatactagtcgtcaaggtttcacttatcggttggctttcacttatttggattatgccgaagctaataatgaggcctatgatacaagtgctgcccgtgaattgtgcttaaaatatttaaataaggtaagagaacgggcaggtgtgcgtcagtacacatttgacgctgtctctgacttggatgagaattttatacatatagagaacacgcaagcagctgtgcgtaaagttgtcaaagctgaacgtcgtgtagaactttgtttggagaacaatcgctggtacgatcttcgtcgttggaaagatgtggaaaatacaccggaaatgattggtgatgattatggtatgaattcagagggaactaccaatgagactttcttcaaacgtaccgtttatcagactcgtgtatggaaaagatgttactattggatgccagtctttattgatgaatatgagaagaacccgaatttggtgcaaactccgttctggctcgaatagtgaataacaatcaattatttaatgaagtaaaaaattatgaagaagatattctatcaaataatggggttgtgcagcatattaggagtggcgacagcctgtaatgaagatccagagtacttcacgctggacgaacagcctgacgagatgcatattgtagcttctaccgataagctggtgttggataaaggaaaggaagacgaaactgcgataacctttacttgggatgccgctagtagtccggtcaatgagactgacttagtgacctactcgttacgtttgtatgctacggcaaataaaagtgcaaataataccgatttttatgaattggatactgatcggaaaaagagtttcacgcatgatgaacttaatgctattattggtacttgggtgttgccggggcaagaggttaaagttactgcacaagtcgtttgtaccgttcataatgcggacaaatacataaagccggaatcgtccacggtagaatttactgtgtcgggttatgagaagtatcctacttatatttacattcacatgacagataatgagggtaaagtctcaactcaacggctaggacaacgcaacatgggaaccggtatttatgagggtacatttgatgtgactccttgtgcgtatcattttattacagtagcaggtggagattatcctgcctacggtaatagtggagatggtcttcatatggtctatttgaatgagggtgaaattacagaatttactaatacagaaacaggacgtcgcactttcattgtggacactaataacgattataatgattgccgtatgatggaaattttagaactacctgttcctgaaacaatgtatatggtaggtaatggttgttctgttggttggactcttaatagtggtgatggtcttttcaaaatagagaatgctcgtaatccacacctgtattcttggacaggtgagttcaatgctggcggtgaaataaaaatcagtcttggaggttcaagttggggtgaagatccgttcttctttgctccggaggccgctaccgatccgttaacaaatcatgacttgacaaagtatcgtctggaaaaagatggcggtgacctcaagtgggttcctactgtaagtggtcgttacaagtttactttctgtttggatgtgaaagatatgcatacagagtttgttcctgcaaactaataaaagaatggaagccggaagaattccggcttcaaaacttgaatactataaatcttgattacaatgaaacatttatatcgtttggtagtatctttactactatttgtgggctttcagtcttgcgttgacgaagatggggccggtgttccttcacctaaaagtttaattatagaggccgatgagtatacgttggacatgacagatcttaccactcctcaatttatagctttccgttgggtagatgtaggtaatgccacttatacggtagcatttactaaagccagtgattctgatacagagaatattgtcacagaagtcttgaacaacgaggtgacagttgaagaagaacttaatgtgttgagtatgaccataagtaaagttcaattaaaagactacttgacaaaagctggctttacacaaacaggtacctatgatgttgttattagcatcactgcaactcctattgatctgtctatttctactgctttagccgaagaaggcagtgtgaaaacggctgtcattcatgttaccagagattgattctgtgtaaattcaaacatctcttctttctttttttgtatttttgcatgaaaagtggaagagatgccttaatattctaaaccaaaccaattattcattattcaaaattcaagcagatgaagaacttttacttgttctttttgataactttcttttcaatttccttgggtgcacaagaaaaatcgaataacgttgcctatgaggatacgaatgtacgttttacagtcatttctgacggtacaattcgtatggagtatgctcctgatggtaaattcattaatcaacactctttcttggctgtagaacgtaattatccggcagttaaattcaaactaaagaaaggtgcatggattgagctttctacctctaaaatgaaactgcgttataaaaaaaatagtggtgctttcactgccgagaatcttcagatttcttcgatgaaagggttgacacctgctttcgtttggaagccaggtatgaagcaacagtataatctgaaaggcacgactcgtacacttgacggatgggacggggataagtgttgggggcacaaagcggatttggaagatgggcttcttgctaaagacgggtggacttgcttagatgactccaacaattttcttttcgatggtgatgcggataactggaattgggtgaagactcgtgaacatgttgagggggctcaagactggtattttatggcttatggacatgattataaagctgcattgaaagactatactctttttgccggccgtatgcctcttcctccccgttatgctttcggttattggtggagtcgttattggatgtatagtgatcatgaattgcgagaattatgcaagaattttgaaaactataatattcctttggatgtgcttgtaatagatatggactggcattatacagataagggacgggggagttggaccggatggacatggaacaaagagttgtttcctgattatcgtaaactccttaaagatttgaaagctgacaatggactacgtgttacccttaacctgcatcctgcagaaggagtccgtagttacgaagaacaatatgaagctgtggcgcgtgataatggagtggatccggctactaaacaggaaataccttggatatcttcaaaaaagagtttcataaaaagtatgttcaagaatgttctaatgcctatgaacaatgccggaatagatttttggtggctggattggcagcaggaaccatttgataaagaagtgaaaaatctaagtaatacttggtggctgaattatatatttttctcccaaatggagcgtgaacgtcagacgcgtccattgatttatcatcgttggggaggacttggaaatcatcgttatcaggtgggcttttcgggtgatacatttatttcctgggctagtctcgattaccagacttacttcaactctactgccagtaatgtactttatggttattggagtcatgatataggaggtcaccagggtgtagaccatattgatccggaattgtatgttcgttggatgcaatttggcgcttttagtcctattttacgttcacatagtacgaagattgctggtttgacaaaagagccttgggtatttagtaatgaggtatctgatattttgcgtggcatcattcgccagcgttataatatggtaccttatatttacacaatggctcgtgaggcttatgaaacaggactgtcactctgtcgcccaatgtattatgattatccggaaacgcaagaagcttatgattaccgcaatcaatatatgtttggtaatgatgtaatggtagctcctgcaacttcacctatgaaggatggttataccgaagtgaaagtatggcttccggagggacaatggtatgaatttgcttccggaaagacgttgcaagggggacaagtattgactcgttatttcgctcttgacgaataccccatttatattaaagcaggtgcggtactgccgatgtacaacgataaagtgatgaatctgaacggtaaggatgaaacgattgttttgaatgttattccgggtaagacttcttctgaatttacattgtacgaggacaatggcgatgataaaaattatcagaaggaatttgctacgactgctattcactctgaaaagacgggctcaaaactgacgctaactattagtccgcgtaaaggttcttataaggaaatgcctgcacaacgttcttatcaggtaaaggttcttgcttcggctatacctgaaagtgtgacagtagacggacagaaacaagatttcgtttacctgaatgaagaattcgctctgttggtagatattccgcagaaagattgtaatagagaaaaagtggttgcaattgaatatcctgtttccgaagtcaatttggatggattatttggtgctgccaaacgtgtagctaaggcgatggagaaattgaaatatcgtaattcttatattgtttttcaaccggacttttgcaaattgggcagcatcaaggaggctatacgttacacaccagagaatttggatgatttgtctgctgagttttggaagagttataaaaacttgcctgccctgttgaaagatgttcaaaaactaaatgaggatgaggtgaaatggttcttacagttgattaaatatgaacaataaatagatttcttttcgtgctcgcttatgaatatcaccgaataaagtaatatataatattatacttaattcacaaaccatgaataaaaagaaactcttgtctctcggaggtgccctgttattgggcacttatttccttttcgcgcagaaacaacctgtcgactacgtgaatcctttgatgggaaccgactctaaaatctcgttatccaatgggaatacatatcctgctatcgcattgccgtgggggatgaatttctggatgccgcagactggcaaaatgggtgatggctgggcatatacttacgcttcggataaaatccgtggcttcaagcaaacccaccagcctagtccctggatcaatgactacggacagttttcaatcatgccaatgacgggacgattgagaattgatcaggagcagcgtgcctgctggttctcgcataaggcagagaaggcaactccttattattatagtgtttatttgtcagaatataatctgacaacggaaattgctccgacagaacgttgtgcttatttccggttcacttttcccgaaacgaaagatgcgtatatcgtgatagatgcttttgatcgcggttcgtatgtgaaggtgatccccgaagaaaacaaaatcgtgggatatacgacacgcaacagcggcggcgttccacggaactttaagaactatttcgtgatagagttcgacaaacctttcacgttcaataaagtctgggcagactatcatacggtagaaaaacatctggagttgcagtccaatcatgtgggagcagctatcggtttttccacgaagaaaggcgaacaggtgcatgccaaggtcgcttcctcgttcatcagccccgaacaggcagaactgaacttgaaggaaatcggcaagaaaaccttcgagcagacgaaggaagcagggcgtaaggcttggaacgacgtgctgggacgcatcaagatagaagacaatgatgaaaaccgtatgcgtacattctactcctgtctgtatcgttccgtgcttttcccccgtatgttctatgaagtaaatgcgcagggcgaaacagttcattacagtccttacaacggcgaagtccgtccgggctatatgtttaccgataccggattctgggataccttccgttgcctgtttccgtttgtgaaccttgtatatccttccatgggagaaaaaatgcaggaaggtttgttgaatacttatcaggaaagcggcttttttcccgaatgggctagtccgggacacagagggtgtatggttggcaacaactctgcttcagtagtggcggatgcctttatgaagaatgtaaccaaagcggatgcagaaaaaatgtacgaaggcttactgaaaggtgccaacagtgtacatccgcgagtttccactaccggacgtcgtggatatgaatattataataaaatgggttacgtaccatacgatgtaaagatcaatgagagtgctgcacgtacgctggaatatgcttatgatgactggtgtatctatcgtatgggcgagaaactgggacgtcctgccgaggaactggacgtttataaaaaaagaagtcagaactatcgcaacctgtttgatccggaaacgaaactgatgcgtggaaagaatgccgacggtacgttccagtctccttttaatccctttaaatggggagatgcttttaccgaaggaaatagctggcactatacctggtcggtgttccatgacgtacaaggattggtcgacctgatggggggcaagaaggtgtttgtcagtatgcttgattccgtattcagtcttccaccggtattcgatgacagttactacggtggagtcatccatgaaatccgcgaaatggaaattgccaatatggggaattacgcgcatggtaatcaaccgatccaacacatgatttacctgtataattatgccggtgaaccttggaaagcacaatactggttgcgtgaggttatgactcgcctgtactttgctaccccggatggttattgcggtgatgaggataacggacagacttcagcctggtatgtctttacggcattaggtttctatccggtatgtccgggcagcaatgaatatgtgctgggagctccctatttcaaaaagacaactattacattggaaaacgggaagaagctggaaatctctgctcccaagaacagtgatgaaaaccgttatatccgttcattgaactataatggcaagaactatacgaagaactatttgaaccattttgatttattaaagggcgggcgactgctatttaatatggataataaacccaatatgggaagaggtgtgaatgaatcagattatccgtattctttctctcgcgactaaaactaactggatatgggtataaagaagagattagggataatggctatggcggcggttacagtatcgtccgccatggctcaacaaccagtggattatgtgaatccgataattggtactaatggtatggggcatacctttcccggtgcttgcacacctttcggatgggtacagttgagcccggatacagacacaattccacataacgtaaacggagcctatcagaagaacgcctatgagtattgcgccggttatcaatatcgtgataagacaattgtgggttttagccatacacaccttagcggaaccggacattcggacctgggcgatattttactgatgcctgccgtaggtgaactgaaactgaatcccggcagggcggattacccggacgaaggataccgttcccgtttcagccatgccacggaaaaagctgctcccggatattatgaagtgatgctggatgattatggcattaaggcgcagttgactgcaacgcaacgtgtgggtatacataaatataccttcccgaaaggaaaagacggtcatctgattctggacttggtacatggtatctataattatgacggtaaggtactatgggcaaacctgcgggttgaaaatgataccttgcttacgggctatcgcataacaaacggatgggcaagaaccaactatacttattttgcaatttctctttcacaacctataagggaatatgggtataaggacaaagaaaaagtgcgttataatggcttctggcgtcgtttcaatatggaaaagaattttccggagattacaggacgcaagattgtggcttacttcaactttgatacagtcaaagaatccgaactggtcgtaaaggtggcattgtcggctgtcagtaccgagggagctatcaagaatctacatgccgaagcttccagaaaaagctttgaagaactggcagaagccgcccgaacggactggaacaatgaactcgatcattttgaggcggaaggaactgcagaccagaaagcaatgctctacacttcgctttatcatacgatgattaatccatcggtctatatggacgtagacggatcttatcgtggcttggatcacaatatccatcaggcaaaaggcttcaccaactacacgatattttcactctgggatacctaccgtgcggaacatccgttcctgaatctagtgaagccggaacgtagtgtggacatggtggagtcaatgattaagcatgaacagcaaagtgtgcacaggatgttgcctgtctggagtctgatgggtaatgagaactggtgtatgagtggctaccatgccgtatcggtgttggcggatgccataactaaaggaattttttccaatgtagacgaggctttggacgcaatggtcagtacttctactgtaccttattacgaaggagtggcggactatatgaaactgggctatatcccgttggacaaaagcggtacggcagcttcctccacgttggaatatgcgtatgatgactggaccatctatcagactgccttaaaatccggaaagaaagagattgccgaaacgtatcggaagcgtgctttgaactaccgtaatatctatgacacgatgattggttttgcccgtccccgatttagtgacggttcattcaagaaggactttgatgtgttgcagacctatggtgaggggttcattgagggaaattcctggaacttctctttccatgtgcctcatgacgtatttggcatgatggacctgatgggaggggagagagtgtttgtagacaaactggataagctgttctctatgcatctgccggaaaagtactatgaacacaacgaggatataacggaagaatgcctggttggcggatatgtgcatggcaatgaacccagccatcatattccttatctctatgcatggacctctgaaccttggaaaacacagtactggttgcgtgaaatcctgaataagatgtatcgtaatgacatcaacggactgggtggcaatgacgactgcggacagatgtctgcttggtatcttttctccgtaatgggtttctatccggtttgtcccggaacagacgagtatgtactgggagccccgtatttgccttatctgaagctgaaacttcccaatggcaatacattggaaatcaaagcaccgggcgtcagtgacaagaagcgttatgttcagtctctgaaactgaacgggaaagtatatgataagatgtatattacgcatgaggatatattgaaaggtggagtattggagtttaagatgtcagcatcgcccaacaagcgtcgtggcctgacgaaagaagacaaaccttactcgttaaccgacggaatcaataaataataaaataaagatatgaaaaagagaaacttgatctatgttacctgtatgctaatcgctatgggagcttgttctgcaacttcaaagaatcaggctgaagttgtgactgacacatggggaaaatataatgtgggcactatcctgtttgaagataaagcaccggaaacgaaaggttctgatgtctatcaccggattattcccgatgcggaatcgtatatcaaggcccaggcacgtgaggtattggccaccctttataattctccggatgatagtattccgacagtgaacaagatacattatacgttggaagatattgaaggagtttcagctaaaggtggcggtaatggtgatgtcacaatcttctatagcacgcggcatattgagaaatcatttgcgaagaatgatacggcaaagctgtttttcgaaacgcgcggagtattgctgcacgaactgacacatgcctatcagctggaaccgcaaggaattggttcttatgggactaaccgtgttttctgggcatttattgaaggtatggccgatgctgtacgtgtggcaaacggtggtttcgatggtcctaatgcccgtccaaaaggtgggaactatatggacggttatcgtacggccggttatttctttgtctggctgcgtgataacaaagaccctgaattcttgcgtaagttcaatcgcagtacgttggaggtggtgccttggtcgtttgatggtgctatcaaacatattttagggaatgaatataatattgatgaactgtggcacgaatatcaagttgcggtaggagatgtacaagcacaataagaataaatatggctagtagattgggtaaaaagagattgtttttggtttggtcgtgtctggtgagtattttgccgggcatggctcaaaccgagaaactgattgattatgtgaatccatttgtgggaacagatggttatggtaatgtgtatccgggtgcgcagattcctttcggaggaattcagatgagtccggacacagatagtaaatactatgatgcggcttctggttataaatataatcattccaccttgttgggattcagcctgactcatttaagcgggactggtatacctgatttgggagactttctgtttattcccggaacaggagagatgaaactggatccagggacacgtgaggagccggaaaagggataccgttcacgttattctcatgagaaggaatgggcatcacctaattattatgcggtggagctgtcagattatggagtaaaggctgaaatgacgtcaggagtacgtagtggtatgtttcgcttcacctatcctcaatcggataaagcttttattatgatcgatatgaaccatactttatggcaatcttgtgaatgggcgaatctgcgcatggaaaatgattccaccatcaccggatataaactggtaaaaggctggggaccggaacggcatatttatttcacggctactttctctaaaaagttgactggtttgcgctttatgcagaataagaaaccggtgatttacaatacctcccggtttcgtagcagctatgaagcctggggaaagaatttgatggcttgcatctcttttgatacgaaagccggagaggaagtgattgtaaaaactgctatttcatcggtcagcacaaacggggcaaagaacaatatggcggaacttgccggactcgctttcgatgaactgaaagctaaaggagaagcactgtgggaaaaagaacttggaaaatatacccttactgccgaccgtaaaacgaaaagaacattctatacgtcggcttatcatgcggctttgcatccgttcatctttcaggatgtagacgggcagtttcgaggattagataaaaatatagagaaagccgaaggatttaccaactatacggtattctctctttgggatacctaccgggctttgcatccctggttcaatctggtgcagcaggaagtgaatgtcgatattgccaattccatgttggctcattatgataaaagtgtggagaaaatgctgcctgtctggtcgttttatggaaatgagacttggtgtatgattggttatcatgcagtttccgtattggctgacatgattgtgaagggagtaaaagggttcgattacgaacgtgcgtatgaggctatgaagaccacggcgatgaatccgaattatgactgtttgccggagtatcgtatgatgggatatgtgcctttcgataaagaggcggaatcagtatctaaaacattggaatatgcgtatgatgattattgtatggcacaggctgccaaggctttgggtaaagaggatgattatcgttatttcttgaatcgtgcactctcttatcagactttgattgatccggaaacgaagtatatgcgtggcaaggacagtcagggaaactggcgtacaccgtttactccggtagcttatcagggccccggatctgtaaatggatggggggatattacggaaggctttactgtacaatatacctggtacgtaccacaagatgtacaaggatatatcaacgaagctggcgaaaactggttccgcaaccggttggacgaactgttcacagtagagttgccggatgacattccgggagcacatgatattcaaggccgtatcggagcctattggcatggaaatgaaccttgccatcatgtagcgtatctttataattacttgaaagaaccttggaaatgtcagaagtgggtacggacgattgctgaccgtttctatggcgatactccggatgcattaagtggcaatgacgattgcggacagatgtcggcttggtatatgttcaattgcataggcttttacccggtggctccttcaagcaatatgtataacatcggttctccttgcgttgaggcaataactgttcggatgagtaacggaaaggtgattgaaatggtagcagataattggtcgccgaagaatgtgtatgtaaaggaattgtatgtgaacggcaagaagtatgacaagtcttatttgaaatatgaggatatacgtgatggcgtgaaactacgttttgtcatgagcagtaaaccgaactataagcgtgcggtatcggatgaagcggtagctccttctttgtcgttgcctggaaagacaatgaaatatcaggcaaatttttcagaaaagaaaaagagtggtaatcctgtttttaaaggttggtatgccgatcccgaaggagtcgtgtttggagatgaatattggatctatcctacgtattcggcaccttatgatgaacaaacctttatggatgccttttcgtctaaagacttggtgaactggacaaagcatccgaaagtcatatcaaaagagaatatcagttggcttcgtcgtgctctttgggcgccagcggtgctttcagcgaatgataagtattatttgtttttcggagctaatgatattcagaataataatgaagtaggagggattggtgttgctacgtcagatagtcctgccggaccttttaaggatgctttgggtaagccgctgattgataagatcgttcatggggctcaacctatcgatcagtttgtattcaaggatgatgacgggcaatattacatgtattatggtggctggggacattgtaatatggtgaaaatggctcctgacttattgagtattgttccttttgaggacggaacgatgtataaggaagtcactccggaaaactatgtagaaggaccatttatgttgaaacgtaatggaaaatattatttcatgtggtcggaaggtggctggggactcccgaactatagtgtagcatattccatttcagattctccctttggtccgttcaaaagggttggtaaaatcctggaacaggatctttcggtagctaccggagcaggacatcattcggtgataaaaggagccggagaagatgaatggtatattgtttatcatcgtcgtccgttaggtgaaacagcagcaaatagtcgtgcaacttgtattgatcgaatgtattttgatgaaaacgggtatattaaaccagtgaaaatgacttttgaaggagtattacccagtccgcttgatagtacgaagtgatgtttttattacatttgccaatgtaaaacgattattaattaaatatctaaatcatgagaagatatattctgttagttgtgtgtttgtgcttagtttcactacttcatgcgcagaaccggttagagttggtttctcccaatggagagctgaaagtgtccttgaatctctcggataaaatctattatagtatagattataacggagatgtattgttgaaagacaattctcttttgttggttctgaaaaatcaagtgttgggacagaaccctaagttgcgtcgtcagaagcaatggagtgtcgacgagcaattaactcctattgttcctttgaaatattcgaaagtcaataatcgttataatcaattgctactgacctttaaagattattcagtagaattccgtgcttttgacgatggagttgcttaccggtttattacctcacaaaaaggtgatgttgaagtaatgaacgaagagtttgctatcaacttcccgtcggattatcttcttcacttgcaacaaccgggaagtttccatacagcttatgaggaaccttacacacatgttcaaagtaatgcgtggaagcctgaagaacggatagctgttttgccggtattgattgacacacaaaaagactataaaatattaatcagcgagtcggatttggctgattatccatgtatgtttctcaaaggaacgggcacgaacggagcaatttctgtttttcctaaagctccgcttgcgtttgccgaaaacagtgatcgtagtgtgaagattactcaagaagctgattacattgctaaaacaaaaggtacgagaaattatccttggcgttactttgtgataagtaaaaatgataagcagttgattgagaacacaatgacttataaactggctgaaaagaatcaactgcaggatgtttcatggattaagccgggacaggtaagctgggaatggtggaatgacgcttctccttacggaccggatgtggattttgtttccggttataacttggatacttataagtattacattgattttgcttctaaatttggtattccatatatcattatggatgaaggctgggctaaaagtacgcgtgatccttatacgcctaatcccaaagtagacttgcacgagttgattcgttatggcaaagaaaaaaatgtagggattgtgctttggttgacatggttgactgtagaaaacaattttgatctctttaagactttcaatgaatggggagtaaaaggactaaagattgattttatggacagaagcgatcagtggatggtcaactattacgaacgggtagcccgggaagcagccaaacatcatttgtttgtcgattttcatggttctttcaaacctgctgggctggaatataaatatccgaatgtactgtcttacgaaggagtgcgtggcatggaacaaatgggcggttgttatccggataatagtttgtatttaccatttatgcgtaatgctgtcggtccgatggattatactcccggagcgatgattagtatgcagcctaatgtgtatcggtcggaacgtcctaatgctgcaagtatcggaacacgtgcttatcagttggcactctttgtggtttttgagagtggtctgcagatgttggcggataatcctactctttattatcgtaatgaagattgtacccgtttcattacacaagttcccgtaacatgggacgagactgtggcattggaagctaaagcgggtgaatacgtcattgtagcaaaacggaaaggcgataagtggtttataggaggaatgactaacaatggtgaaaaggaacgtgagtttaccataaagttagatttcttgaataaagatcgttcttatcaaatgacatcttttgaggatggtatcaacgcaggacgtcaggcgatggattatcgttgcaagtcatcccaggtgaaagccggggagcagctaactataaagatggttagaaacggtggctttgcagctgtcattgaatgatggcacatattctaactttccatacataaaaatggaaatcatctttcaatctatcaccatccttctgaaacaccttgttcatcgagctttcagggcggtgatagattgttctccacctatcacctaatcattcatctatcaccgtctgaaatgaacatgcctgcatataaacataaactggtatgtaaatagaagtttcaacaggggatacttttggtttcacggcttgaaacaaagtgttttaccgcttgaaactgtttgtttcaagcgttgaaaccaatcgtttcacggtacgaaacactttgttttgctatttgttctaagaaggcaatgcttcggaatcaacgttttctcttagagaaccactctttaaactctgctactcgggctttactgacaagtattttttctttgattcctgaataatacaagttaatggacaggcggctgttgaaccataaatcaatatctttaatagcttctcgcgaaataagatattggcggttagcccgaaagaaaagagaaggattgagacactccgtaagttcatctaatgtttgagaaaaacagtattcggtttcatcggttaagactactttgacctgacagtccttaatataaaacaattgtatcatatctacagaaacgggcaatagtttgtctcctttgctaggaataaggaaatgacttttatagttttcctgcttttggagtgaatgtatcagtttcagtagctcattctcctgttgtggaaaaggaaactggtgtttgtcagcagcatcctgtaaactttgcagcttatcgaaagcgtgttctatgtcttccttaccgatgggttttaataagtagtcgatgctgtttactttaaatgcgcgtaatgcatattcatcataggcagttgtaaagataatcggacaagtaatattgatatgattgaatatctcgaaggcggaaccatctgccaggtgaatatccatgaataccagttccggcatcggatgagaactgaaccattcgatagtggaactgatactatccagtatggtcacgatttctccattcggttttatctcattaagcagtgaagtcaggtttcgtactgctgctttttcgtcttctataatgacaatcttcatggtgattattgttctagttgtgatttttcaatcaaaggaatacaaacagtaaactctttgtcctccgttatttgtatatcccgtttaaacaagagcctgtatcgcttggcaaggttggcaagtccgataccggttccggaagttgcagtccatttgggctgaatgtcgttgctgatagacaaattgccgttatcgtccgtcgtgatatgaatggtcaacggcttccggttgctgatttcgttgtgctttactgcattctcaatcaacacttgcaccgccattggagggaggagatattcttcgtaggcattgcttatctgtatgtcgaattgtagattgttctcaaaacgcatctttaatagaaatatataagcggaaacaaattccatttcttcccggagactgacacattgtgactcattactttgcaaagtataccttagtacccgggagagttcctgaatgtaatcctgcgctttatcctgattttcgcgtaccagcgaacgcagggtattcagcgagttgaacagcatgtgtgggttcagctgattcttcagtacttcatactgattgcggagattctctgcctgaagctgttcgttctcaataagtaccagttgctgcttgaatataagatgaatgatacagcaactactggtgacgagacatgccacaataaaatcccgcaatggatgcaaataatgatgtaccatggcatcgatggccggaatatcaaacgttctgtgaaggaaaacaaaaaactgtcctgacaagttactcaatatccatgtcacgataaaggaaagcaaaatctttgtccctgtaattttaatggaagcctggttgaaatgaaacaaacgggtattgatggcaaaaagtaacaatagcgacagaaaggtaaacagtatttcgtttgccacatctataaacttcatccctgggaataaggaatgactttcgaaacggtcgaaaagagatactgattcaggaaaatgaatcagtacagcaaccgcaaaggagatgatgactgtggaaagtatatatttatctttttttattgctttggctatcatacaacaaagatagtggtaaattatgagttaccggttataaaatgtcaatgctgttgtcacagttggtcaattattatttctgaatgtgtgccgtgacatacataccggggcggaattgtacattttcctccttgatggaagcatatacctcgagcgaacgattggtttcgtctactttttgtccgatggaaatcacgataccgtgaaaggtttgtgtccccattccgtttacacgaaactgtaccgggctgccgacttgtatgtctgcaagatctttctcgtaagtagtcaggcaaagcatcgggctgcttttatcgataagttcgcaaagtgcttctcccggattgatatatttgccgatatttatcgctacattagcggcataaccactaatgggggctttgacttccagtagcggttgtattccgttcttaagtaatgcctccgtttgaacgcctaaaagagaaagttgtgcagcagcggcgtcctggcgactcttcatggagagaaagtccgctttactttgctggaatttcttttgagaagctgcttgttcggcagacagatttttttgccgttcgtattcagctaagagatattcggtctgtgcgtgactgtccagataagtttgttgcagggtgatgaactccggattctctaacgtggcgattacactgtttgcagccacccattgccctgggagcagagaagccttttttacaatgcctcccatggtcaaagcaatggttgcctgacgttgaggaggaagaacgattcgtccgttgaacgaaacctgattaggctttgaggtagctgaagtgatggcatccacttcgggttgtgcgatggtatctgctatcgtttcggcaacgggaattgcggcgaattcgttatttgtagtttgctggtttcctttgcaagccgttagaactagtaaaaggatgggataaactatctttttcatatcttatgttttataataattattctgggtgatgtatgtcattcaatgtctcgattttccacctacttgaaaagttcatattccagtgcagcaatattgtattggtagactgtttcaatatagcctctgcggatctctctggcggtggtaatcgactgtatatattcggcaatgcctgtttcgctctgctgcaattgcaggttggctgcctttgtcagttcgtccgcttctttcagggcagaagaggtataatatcgtaaactctcattatttctgcggagggatgcttccagttcgagtgttttatttcttaactcccggatgttggcatctgcctgtatttgcgctgaagtggcagttagccgtgcctgcttcactttgctcttttgtggcaggaagtagatggggaaagaaaccccgatcatccaggcattcagattcttaagtgggagaatgtcctgacgtgtataccccacactgatttcaggaaagaaatggctctgctctacacggagcattgctttcgcttcatctgcctggctttgaaagtaggcagtatgtgctcccgacaggtttccatccaaaatgccggtatagaataaggataaagtggaatccgccggaacaatgggatcgttggagtagcaactccattggaaacctgccaatgccattttctcttcttcttttgcttggaaccagcggttatgcagatcggcagctatggtggtcatcatatttttctctagcaaggtaatctctccttgttggtatcgtaattctccgatgcgctgcagttcttctgccattttatcctgatcccgatacattgaacagagattagtggcatattggtagtaggcccacgcccttttcacttctgctgtgatttctttctctaccatctgccgataataggtgttcgtttttacctgacggttgactaacgcattcttgtagaatggcgttagaagagagcccaggctttgctcgaaagccagttccttgtcttttttgttttctccgttaagttgaccccaggaatagctgaacgaggtaggcgttgcttctatcacttctccgcgagtggctttggcttgttgaatagcattattggctattttcaggcgaggatgattttgtttggctatttctatcgcctgttcgagactgactgtttgtgtctgttgagcggaaacgaacgcgggaagaaacaagaacaggagacacaatcccccgaaaggccagcgtagtttgattcccggacgtctccaagtagcaaatgaatttacaattttgtaaaacaccggaatgatgagtaaagtcagtacggtagaaataatcaagccaccgatgaccactgttgccaacggacgttgtacttctgcgccggctgaagtggctattgccatcgggacgaatcccaaagatgcaaccagtcctgtcaggaatacaggacggagcaagtgtggagtccctcttttgataatctggtttgtagtcatggaataggtattttgtttacgaagttcgttgaagtgatttaccatcaggataccattcaatactgctaccccgaacaaagcgatgaatcctactccggccgatatgctaaacggaagtccgcgtagccaaagtgcggcgataccaccgatgagcgatagggggacggttgagaataccatcagggtataggtgatgttcttgaatgcgaagaacagaatcaatagaatgagcattaatgccacggggatgactaccagtaaggtattgatggcattttgcaagttctcgaactggccgccgtattcgaagtaatatcccggcttcagtttgatgttcttgttcagtgtctcttgaatattggcgacaacttgctggatatctgcgtcacgcacattgacaccgatgacgatgcgccgtttggttgcatcccggttgatttgcagtggcccactgacaaggtcgatgcttgctacctctccaacagggatttgaattccttccgaagtgcgtacaaacaacttatcaagattcaagtcggccactttctcttggtcaagccggaccacgagatcgaatctccgttcgttttcaaagattacacctgttgactctccggcataggcagttcggataatggtgttaagctcttgtatgttgatgccgtaacgggctattttgccacggttgtatttcactaccaattgaggtaatcccatcgtctgctcaacgatgacatctgctgctcccggcactttttctacaaaagtagctgcttctttggctctttcatataattcgtgcgtgtcttctccatataatttgatggcaatatctgctttcgctcccgtcatcagctcgttgaagcgaagctgtatcggttgcgagaagttgaattcggcacgttcggagagcggagcaagtgcatctttcattttatccaccatttctgcacggcttccggcacttgtccattctttgaatggtttcatgataatcatcacatcggcgtcttccaccgccatcgggtcagtgggaacttccgccgttcctattttggctacaacatgtttgatttcagggaatttatccattaatgctttctctgctaagcgggatacttcgatactttcggtcagcgaacttcctgcgggtagtgtcatttgcatggcaaaatcaccttcgtccaaagtgggaatgaactctgctcccaggcgggtaaagagaaaaagtgaaccgatcagcgcggagaaggctatgatgacggtacgccatttgtaacgaagacaggcgcgcagggtgtgctggtagatcttgttcagtttctcgaagaagcggtcggcaagggtgggtttcacaacaatggtatgcttcagaaagagggaggccatcataggaacataagtcagtgaaagaattaaggctccgataatgcagaacacaagtgttttggccatgggggtgaagtatttcccttcaatcccgttcaatgtaaggatggggaagaagacgataaggataatcaacactgcaaaagtggccgaacgtgcaacgccggaagctcctttttccacttctttgtccatctctttgcgggtcagtgtgcggcctcggaattgttttccgtaaatgtgggcgaggataccttccaatataacgatagagccatctactacaataccaaagtcaatggcaccgagactcattagattggcggtgacattgaatacacgcatcatgataaaagcgaaaagcattgccagcgggatgacggatgcgacaatcagtccggcacggaggttgccgaggaagaggatgagtacaaggaagacgataaccgctccttcaatcaggttgttgacaaccgtagagatgttccggtttaccagttccgaacggttcaagtaaggttctatactgactccttcgggtaatagctgctgtattttttctacccgtttttcgagttcttgagtcactacatttgcgttggcacctttcagcatcatggcaattccgccgacacactcgccctcaccatcctttgtcatggcaccgaaacgctttggagaaccgaagcggacaactcctacatcactgatatgtaccggaatcccattccggttggtcactacaatctgttcaatatccttgatgcgggtaatcataccttcagaccggatatagtaggcgttctttatcttctcaatgtagcttccgccggtattttggttgttgctgctaagtgcttcgaacacctcgccgatagtgatattcaaagagaacagggcgtccggatcgacggctacttcatattgtttcaagtaaccgccgaaactattgatttctactataccgggtataccggacaactgacgtttcaccatccaatcttgaatggtgcggagctccattgcgtcatatttcttctcatatccgggagctaccttcaatatatactggtaaatctctcccagaccggtagtgatgggcatcatctccggtgttccgagctcggagggaatttcgcttgttacgctttgtatttgttcatttatcagctgccgtgcatcgagtgtggggacactttctttaaaaacgaccgttacgaccgatagcccgaagcggctgacagaacggatatcttcgacattcataatattgctcatcgctatttcgataggcatagtaatgagttgttccacctcttgtggtgcgagtgtaggggatacggtcactatttgtacctgattattggtaatgtcgggcacggcatcgataggtagtgtcagcatcgcatagatacctccgataaacaggaagagagtagtgagtcctacaaatagtttcttcttgattgaaaaacgtacaatagctgtaaacatgattttcgttgtattattatttcacagtacaaaattactgcctatcttcatccgttatcactaagaataaatgaagcggaaagattgtggggtgaagtgacggattggggaattgaaagatgtaaaatcatagttcttgtttcactgctgaacaaacatttctttcagtttactcgtttaatataaaaacaaactaaatgtatattcagcatgaaaacattcgtcttgatgatggtaagcctgttgtttgcaatttcttcggaagcgcaaaacaagtctttttatgattttacagtgaaaacaattgatggtaaggactttcctctttcttcactgaaaggtaagaaagtgctggtagtcaacgtggcatctaagtgtgggctgacgccccagtatgctcaactggagaaactatatgagaaatataaagaaaaagactttgttgttatcggttttccggcgaataactttatgggacaagaaccgggtagtaatgaggaaatagccaagttctgttctttgaactatgatgttacttttccgatgatggctaagatttccgttaaaggaaaagatatggctcctctttaccaatggttgacggagaaaaaacagaatggaaaagaaagtgcaccggttcagtggaactttcagaagtttatgattgatgagaacggacattgggcgggagttgtgtctccgaaagaaagtccgttctctgaaaagattattacttggatagagaaggaataagagagacttttttcagctcttcttcgaagttgggagtgaagattcctttacccagattttcttttatttcttcgatcttccaaaatcgtccaccgtccagttcgtcgctgggatggatttcttcctcataaacggttttgtggacaaaaacaagctctttttcacggctggattcaaaaatataactggtgagaagctccggagtgaagtctgtgatgcctaattcttcacggacttctctctttagggcgatttctacgctttcgcccaaatcaatatgtccgcccacagccgtatcccattttcccggttgaatgtctttccattcggggcgtttctgtaaatagatgtctccttgggcattgaatacgtgaaggtgaactaccggatgaagcagtttgctaccgctgtgacattctccgcgagtggcggctccggtgatatttccctgttcgtctacgatagggaacatttcttggttattatcgcttggcatagtgtcttttatattgcgtaaaatctttcggagaggagaatatcttatggtattaataaagaagaatctccataacttaggaaccggaaatcatgcgccagtgcataatcataaatagtgcgccaattcccttttacaaaagctgaaaccaaaagcagcaaggtactttgcggctgatggaaattagtaaccatcgctttcactattttataattgtatcccggtgctatgataatctgtgtactggtgtgaagggtttccaaaccattcctgtcgagatatcctaatatcttttgcagcgcaacaacgggaggaatctggtcgtacttttcataaggctgccattgtttgacacgtagttcttcttccgtagcatacggattttcagccaatgtaactccaatgtgatacaggctttccagagtccgtacagaagtagtccctactgcaatagcacaaccgtcgtggtcaatcagttttttgatggtactccgattgaccgatatatattccgtgtgcatctcgtgaccttcgatttcttcactttttacaggtttgaatgtgcctgctcctacatgtagagttaattcttcaagatcaatccctttctcttgaagtgcatccaatactcgtggagtaaaatgtaatcccgccgtaggcgcagctaccgaacctttaatcttagaataaacagtctgataagtctccttgtcactttcttccgtatcccggtttaagtaaggaggaataggaagttctccgaatacttcaaggatatcggcaaacgtcacttctggattatcccatgcaaaatctacccaatggctggttcctttacattttcctcgggtagcggtcagggtaatagggaatcctttgacggtcatttcgcgtttcaactgtccgtctttccatttcttcagattgccgatcatgcaaagccaggcggcatgtactgtctgttggaaattcaagacataatcgtttggctgaatcggttcaagacaaaacacttcgatcagtgctcccgtctcttttcgaaaatggaggcgtgcctgaatgacttttgtattattgaatatcatcaggctgccttgcggcagatattccggcaaagacgtgaaaacatcttcactaacttctccacgacggtatattaagagtttggactggtcgcgggtaggcaacgggaatttagcaatacgttcatccaaaagaggataactgtattcactgatatggatatgtctaggatcttctttcattgttttctaaaataaaaagaggttagaacccattcggtttctaacctctttaaccagtcggggtgactggattcgaaccagcgaccacacgccccccagacgcgtactctaaccgggctgagctacaccccgaattgcggatgcaaaagtacagattaatttttaattagcaaataaatagtgtgaaatttgtttccttattaaatggattgttttactaatcgtttgatttatagtgaagtgcgtgtatgattatttgtgctttattattccgataatggggctggaagagagagtgtttccccacccttataatttctattagtatttatttacctctataatttgcttttggttgtagtaatttggataaaacgtgtaatgaataagtaatgattatgtaatcgatgaagtagtgctgtatgtcttggtaattaatagttaaactttcttaatataagaaatatgattacttttcattgtggggtggtgcgaaaaatgtaaatttagtcgtcgaaaatcgtcaaaaatgcacgagttcacttttgcaatgtgcgtatatactacataactaaataaaaatagaatatgaaaaatatgaaaattatgctctataagagcaaccaaaagagagacggaagttaccctgtgtgtttgcgtatttctaaggatggaaaacggaaatatatcagtttggggctatcagcgcaaggggtgcagtggaatgacgatgccgaccgttttaagaaagataagcgtgtatgtcccaattatgagagggataatttgtttctgaactcctgcgaggagcgtgcggggaaaattttgttgatgtttgcggaaaaacagcaaaattggtcattaattcaatttgaagaaacgttctgttgtaaaaatagggaaaataaattatatgatattataattgaacatatagagctcctgaaaagtaccaatcatataggaaatgccaaaaggtttgagggtactcttaggatgctggaaaagtatgataagaaaattaaagaacggacatgtgcagaaatagactttaagtatgtcagtgcttttaatgcggcattggaaaaacgggggtgttgtggcaatacccgaaggatttatttgaaacctttaagtgtgatactaaataaggctataaaggaaaagaaatgctctttggatacctatccgtttgggaaaggtggttttgaactgggtaaactgtcagaggtaacggaaaaaagatatttgcttccgcaagaactggaacttatcaaagaatcaccccaggaggattttgttttggagcgtgcccgcagactctttctgttttcctactattgttttggaatgagtatggtggacatggcgaaattgacttccgctaatattaaagtattggcgacgggtgaacatattgtatacaaaaggcacaaaacgcagaatgccaaagaaatgaagcccataataataaagataaatgaacctataaaagaactgttggattggtttaaatcgaacactcctctaatgggggactatcttcttcctttgataaccaaagattatggtgaagaggaattatggtacgaacatagacgtacgagatacaaaaggattaataacaacatgaagaaacttggtgaaaaattaaatattggaataaaactgaccacttatgttgcccgtcatacaatggcaatgcagttacagggaaagaatgttccacgtgaggttatcagccaagtaatgggtcatgccaatattgacacaacggctacatacctcgcaagttttgatactaccatattagacagaacagtaaatttattataattaaaaaacaataaaaaatgattgtattatgcctctgggcgacttgataaacaagttgctccgagggggagcggatgaatggtgtgaaacggattttgggttttatcttgaaagtctgacacatggtgataaaaaagaactggaacaggtgctggaaactgttgatgaggctattgtcaactggaaaagcctttccttaatttcccgttatgaggataaaataaaagaatgggaagagggcaaatgtagtatggacgaagtggacgaattgtattttgaagaggaattgtggcggaaagagggaaagagactgctaacagccgaaactttatatgctgctatatccagtaagggttttataaatgactatcatcatgatgcgatggagaaggcgttggacaataatgatgtccgatacttaaagacggattgggaaaatatgatgttggctcaaataaggtcgtttaaggatgttattataggcaggcttgaagtagcttccgttaaaccaataatcgataaacagagcgtcgtaagagtgcttaaaaagctgaatgattatccggaagtattggatgttatgctttgcagtgaatttttaggagtgtccatacataaactttataaacttactagtgcccatgaaattcccttttaccggagcaagggtaatggacgtaagttgtcttttaagcgtgatgaggtttatgagtggcggatggctcaccgacaggaaactaatgaagagtatgtgaatgaaatgaacgaacggttggcggctcgttctaccaatttctataataacccaaataagttaaaaaaatgatcgatacacttgctctaatatatactccgtcaatagttgatgggtatataaatctaatgtctgaaataggtgctaaaattaatatcgacctcaaaaaaagtaatgagtttcgtgtcgttggtaaatacaaaaatctttgtgtttatatcgaaccaacctttgtccgtattgagggtagcttccctaaatactactatggtactaatttaaagcctctatcacatatagaactggggttagctattgataagttgagtgcagtatttggtttaccattaaagcaagctgttataggtcgtattgatatagctactgatgtggaagtagttaatcctccttgttcttatttttcttccctaggtaatttagcaaagtttgataggaatatacgaagaggaagtttatattatgagcaagggtggtgtaaactatgtttctatgataagatagcggaagccaaaaagcataacgattgtcatttaacggaagaacttttaaataagaatatcctacgatatgaaattaggtataggagagatcgtcttaaaaattatttcgggcgtgatataaaggtgtgggaagtatgtaatggctcgattgacgtttattgcgagttggtagctaaatcgttttttatttataacgatatagtgaagattggtaatttggagttcaattttgatatgactatggcaggacttgggaagtgggctattttaaaacagtatcgggatgggacggatttgatgaaattgatagataattgtagtgaaaaaggagataagagggctagacgtatgaagagggagattatgaagttgctgaaagagagatatgtacttgatgaatcgacggaagaactgaaagagaagatatttgatgctgtttgtgaattaattgactaataaactgataaactgataagatttgacctgacactaaccaaaagactaaaatccaaacgttatgcacgtttgtctttcccccttttgtttattgttcaggtcaaatcttatatataactcctctattggaagcgtgttgccacttttgtctttaaaaggtataatttactcagtatgggaataaaatggctaaaactgccttaaaacgagcctctgtgattgaagtatgtgatgaggttgttgttggggtatcgatggactatatagggttcgttcttaattcgttttatggatttggaagaatctactctatgtgaagatatcttgtagtaatgtagctctgtaatggctagaaatccttgcttttgtccatggatttgttatatttgcattgtcaaaagatggtagttttgcacaaggagggatggggaaatgagcgaagatattagtaagctaatattagacctgctaatgtagactggacgccccaatttacaatccacttttaaatagattagatattatcactaattacgcaatgcaatatgagtaaaatgacagaagaggtaactcgggcgatagccacgaagttcctagatggaatagaagattttgaattgattaaagaggaaaactacaaaaactatgtagtctattttgcagcttataaaaaggcgaacgggaatacaaattacggacttcctatttatgtactgattgatgaattgggtaaagcccgattcgctacatctgaagaaaggcatgaaatttggcatcgtaatgaccctgaattggaagacggcgaggacgaggacgtggagtatatagaattacccggcttgtgtaatggacgaaatacacttctggatgggaaagaggactagtagaattaccacctatgtaagttgacatcctagtttgtaatctgctttttatatttattattcaggtcaaatcttatatataacatctctattggaagcgtattgccattttcattcttcaaagggataatttactcggtaagggaataaaatggctaaaacgctttaatacgaacttttgtgtttgagtctgtgctgaagctaattgtgaggtctcaatagcaaaagtgataaaaaggacataggaagcctcatcgaagcctccttctaaatgtctagtgacgcattgctctgtcagtcctcgtcgtcttcttcgtcaggattcgaacgcatcaatatttcatgattttcttcgtacgtggcgtatcgggctttacccaattcatcaatcagtacataaataggacgtccgacatttatttcacctgtcacaccatctggaaaagcaaaatagactatatagtctttgtagttttccaacttagtcaatttaaatccttctattcctcctaggagctttatggctattgcccgagttacttcttctgcattcttgtccataattgttgttgggtataaatgtttttattactggactatgtcttttatccattccaaagcgttgtcgtttgcttcaaaaacaaattcttgccctttggctgcggaaataaaacagtcctctttccaggaatttgcgttataacttattggaatttgccggaaaaaatcgggtaaattccatactctcctgctgcatttttccttagtaagtacaagcccgtttgaaaattgcaaacatccggctccgggtagttgaggtaaaaatgaaagtttggaagaagccgtataaatgacatttggactgttccacctttccatttttgcatgtgggtgtccgtttaaccatgcggggatattggtaggagtgtcaatgatttctcctatttgaagatagccgtatataacatgccaatccagagcgtcttttttataacgtaattgtccggcaatatactccgtttgtttgaaccaaccaaagaataaaaacaagtctccgattcccaccccctgtttttgcaggtgtcgtaatgcggtcttttcctgtccgaatgtaggcttccaccctgttggtctatcctttattgctcctctgatatcggggtctaaatggcagttatattcttcttttattttgttgttggggcttaaagtatggatgatatcgtaatatgaactattgccatagtataaatctctatactttgtttccatatctgtttttgagggtatcggcaatgacagtaatgtcccgtccggcaatattggactaggcattccaccatattgggaatcaaatccctttctacttaatataactctcatttggcgtcagtgtatttgcatagttcaacatgttgtttgacgtagtttataaattctgcggcatcctttgttattactccatagcttgtttgcactttaggaatgttgggacgtaactcaacagggatatccaacggggacaaacgactgaaataataaaattcttcacagataagaacatattcccctctcaaatccttgtccattttgtcttttccatggaaattattttctatctgtataaattctttagggttagtcgggtttggtttatatatgttgtctccataacgttgtataactttagtatcttctgtttttgcagggcgtttttgttcatacttttcccagtattcagcaaaagaaagtttttgtgtcacttttgctaaatagacaagtttttcttttccaacttcggtcggactgtcctttagttgttttgaagtccatcccgcaatccagtttcctattttggtgttgcgacgcattgcaggcttacatgttgcaagtgtcagtactccaaataaagggtttggagcaaaacggttgtcatgcttcattttataactgtacagtttgtaatctgtagttttcatatttgtcggtgttaagagtaaatattgatatttagcttttatttccgacgaatatatcaaatattatcttaaagaacgatataaatgggatatttttaattatatttgtcgtaattagtttgtgttgatgcttcatctgtgtagatatgaaggataatgggggtatttagtttagtaagtttatgtataatcaatgcaattatattattatggcaacgaatgacaacaacattgaaaagtcctacacgttggaaattacagaaagggacaaggcgttcaagcgtagatatcaagcggcttcccccgaggaacaggaaaagatgggatatgatgtgccacatcacgctgatatggaagatataataattacggaaatggcgaacgaatggttgcgtgatggtaaaccagtagattaatctaaagaaattacactatggcaaagaaagacaacaacattgaaaaggcttacacgtttattcctggcgaaagcgacaaggagtttaaacggatgtaccaagccgcatcaccggaaaagcggaaaacaatgggttttgacttactaaacgatgcagatgcagaggaattggagattaaccgtttggcgaatgaatggttgcgtgacggtaaccccgtagattaatctatagaaattacaatatggcaaagaaagaagaaaacaacattgaaaagtcctacgaatttgtaatttacgagggtgataagaagtttaagcgcatgtaccaagccgcttccccagaggaacgcaagaagtttggctacgatgtaccaaacgatgctgatgacgcagacttggaaattacccgtttgaagaacgaatggttacgtgatggacaacctgtagattaaattgtcttatgaatcaaaataaagcattggagattgcctataaggctcatattggacagttagacaaaggtggcagtccgtatatattgcatccagtcagagttgctttacactgtcaaacagaggatgaaaagatagtagcattgttgcatgatgttgtagaagatacttccataacatttgaggatttaaaagcggaaggggttgatgacaggttactggaggctttaaaatgtctgactaaagaagagggtgaagattataaagcgtttattgaacgtgtctctactaatcgtttggctacaaaggttaaaatacaagacctaaaagataatatggatgtaacccgtttgaatggtaaggcacattggaagttggaaacatataaagaagcgttggagtacctcgaacggtgctcaaataagaaagttttatatgtagatatggataatgtattggtaaacttccaatcgggcatagacgccttagatgaggacttaaaaagccgatatgcggggtgttatgatgaagtccctaatatatttgcaaaaatgcaacccaatgaaggggcaatagatgccatgaatcgtttaaaagacaaatacgacatttacattttatcaacagctccatgggataacccaagtgcatggtctgacaagttagaatgggggaagcgttatttgggtgaagtatgctataaacgtttgatcttgtcgcaccacaaaaacttgaatgcaggggattatttaatagatgacaggaaaaagaatggtgctgccgattttaaaggtgagcttatattgttcggttctgaacggtttccaaattgggagtctgtggtaaggtatttattgtgataaaaacacgaagaacgcaaaaggtgttttgcactgcaatttgctttagtttggattaagtttcccgaaagaggtaatgaatgagtaatcgagctaaaaaataaaggaactagataactatctaattccttgttttatatgtgattgtaaaatgaaaatcttttactcttttcacgcccccccccccagacgcgtactctaaccgggctgagctacaccccgaattgcggatgcaaaagtacagattaatttttaattagcaaataatccgttgatttttctagtatgaattgtgccgatttatagctattattctgattattagtctttcttgtgaacatacaaatctttatttcaatgagttagtagtttttttgattgcctcttatgtgatataaaagtacatttctttaattttgcttgaattagaaaacaatctgcttatttttcatttgaaagcattaatccttttcctgtcctaaaaacactataaaaaacaggtcagtctataataaaacgaaataggaaaatgataaatgaactaacaatcagatagtttgtttataaattaatgcaaataaaaggtgtttgacttccttagtatgatactatatttccatttttggtgcgtggtaaattaggaagttatacatttgtaaaaagacttagtttagaaaggtgttaaatgttagacattaaaaattgagagacattagagatatacgtcctgggtgacgattttaaattttatcaaaatctgaagtatcttcctttgacttcttatccttctaataatcaatcagctttgattatatattgtttaggtggaaaggccaaaattacagtgcatgaagatgtacattggatacaaccggaggaattgattatattattacccggacaatttgtctcatttagtgagccaagtgaagatttctcgaccgttacgatggttatatctacttcactgtttagtgatgcgttaagtggtgtgcccagattttctccgcatttctttttctacatgcggactcattactggtatccgcagtcagaacgagatattccccggatatataattatctgggtatgataaaagataaagttacttctcaagatatatataggcgggagctgattattcatttgttgaggtatctgtatctggaactgttcaatgcttatcaaaaggaatctaccttgatgactgcccgcagggatacccgtaaagaagagttggctaataaattctttgggcttatcatgaagcattttaaggagaataaggatgtggctttttatgcggataaactgtgtattacttccaaatacctgactatggtaattaaggagacaagcgggaagtctgccaaagactggattgttgaatacatcatattagaaatcaaggctttgctgaaaaataccagcctgaacattcaggaaatagcgattaaaacgaactttgcgaatcaatcgtcgcttggacgtttttttagaaagcatacaggaatgtcgctttcacaatatcgaatgagtaacttagaacaatagtgcggacaattgcctcacaataggcaataatatctatagggattgggaagagaaagggaatgaagtctatttcattcccttttattatgcggtatatctgatgtaggatgggttaaattcccatacattcgcgatagaagtcgagcatttcgaagatagtgtccttatcggcagtctgattgatgcaaatgtctccaatatcttttagtaatgtgaaattgatagtgcctgaagtattctttttatcatgcgtcataaatgcatacagttggtcatattttttgcagtcgaaagtaaatatgccataattatccttgataaactggatcgtttgccgcattttctctttcgggaaacctactttgagatgagaaagatacagttcgcacacaattccccaagctactgcatatccatgtaatacaggacggttttctgccagtgccatactttcgaacgcatgtcctacggtgtgtcccagatttaatgctttgcggattccatgttcgaagggatcctgttctacaatatcttctttcacttgtaccgattggcctaccaattgtttgagagctgcataatcaatactagaggaatcgaaattgagcaattctgcccaatgtgccgtattgctaatcaaaccatgcttcaacatttcagcatatccggagaagaaattgtgtgtgtccaatgtgcgtaggaattcagtttcaatcaatacactgtttgccggagcgaaagcaccgatttcatttttcagtccgttgaagttgattcctgttttaccccccactgatgcgtccaccatggcgagcagggtggttggtatattgatataggaaatgccccgtttgaatgtagctgcggcaaaacctccgagatctgtcaccatccctcctccaagattgataagtaaagagtggcgggtagccccttgagtgcttaatgccatccagacggaagcgagtgtttccagagttttatgcacatcttctgctccgatacagatttctacagcatctttcaacagacccgattcctttagagaggggagacaaagacgctgggtatgctcgtctgtaaggacgaataatttgtcatgcggacatagctcaatggcacgaccgaggctcgtttccaagctttcgcagagaataacttcttgtttactcatgattcttttgcttttttactctgcaaatgtatataaaatatctttttttacttacttttgtctcattaaaacgtttaatcatgaaagcattattacctgtatattgtcgtcctttaggatatgttgtcttgttggtagctctgtttatcccttttattttggtgatgcagggagtagtaactgatactaatttgctgttttataaagaatgtacaaagttgttgatgatggcaggatgcttgttgataatctttgcattgagtaagaatgaaagccgtgaaacggagcaaatccggaattcggctgttcgtaatgccatctttttgacattcttgttcgtctttggtggtatgttgtggcgtgttatgcaaggagatgtgataaacgtcgatacttcctctttccttacttttctggtttttaatgtgctttgtctggagtttggtctgaaaaaagcgcttgttgatcgattctttaaaagataattttcttttcaattaaaccttttgcgattcgatttgtcaaaaagacattgttattgctactaatataatcgtaaataaggtaaatgaaaagattttcagcagggttggtgctgatgttgctatgcaccttctcaatttttgcacagaataaggttattaccgtttcgggacgtgtggtggaatccgatactaaagagcccgcagcgcaggctacagttcaattgctatcattacctgatagtgcttatgccgccggtatagccagtagtaaccagggatggtttactctccccaaagtaaaagccggaaaatatgtgttgaaagtttcctatattggattccgaaccaagctcgtaccggtacaattatctgctaacgccactgataaaaaattgggaaccattacattggaccctgatgctgtcatgctgaaggaagcggtgattactgccgaagctccgcaggtggtcgtgaaagaagatacgctggaatataactcaacagcttaccgtactcccgaaggggcgatgctcgaagagttggtgaagaaacttccgggagcagaaatagacgatgacggtaacgtcaaaatcaatggtaaagaagtaaagaagattatggtggatggtaaagagttctttggcggtgatgtgaaaaccggattgaagaacttaccggtcaacatgatcgacaaactgaagacgtacgataaaaagtctgatttggcacgtgttaccggaatagatgacggagaagaagaaactgttcttgacctgaaagtgaagaaaggtatgaatcaaggttggtttggtaatgcaagtgttgccggtggtacagaagatcgttacggaagcaacttgatgttgaatcgttttgtcgataatagccaattctctttaatcggttctgctaataatgtgaacgatcagggattctccggtggaggtggcggacctcgtttccggaacagcaatggtttgactgctaccaggatgttaggggctaactttgctacccagactgaaaaattggaactgggaggtagtgcccgttataatttcagtgatcgggatgcaacatctacaaactactcggaacgtttcctgcaaaatggaaattcttattcaaattcgaacagtaaaggccgcaataagaatacgaactttaatgcagactttcggttggagtggaaaccggacacattgacaaatatcattttccgcccgaacgtttcttatggaaagtctaatagttattctatttccgaatcgggaacttttaatggagatccatttaatttggtgtctaatcctaatgagtttttgaataagattttctggggaagtacggatgatcctttagaagctattcgtgtcaacgccagtaatagtgaatcaaaatctgaagggcagaatctctctgcaaatgcttctttgcaagtgaatcgtagattgaataatcagggacgaaacatcactttccgtggtacatttagttatggagataatgacagcgaacagtttagtgaatcattgacgcgttattttgatgataatgcaaaaaaagaagatgatgagcgtaaacaatatactacttctccaaccaaaaattatgattatactgccgaactgacctatagcgaaccgattgcgagagctaccttcttacagttccgctataaatttcaatataaatatagtgaaagtgacagaagtacatacagcttgattcctgatgccgataaaggacaggattggttttggaattttggtgatggtctgcctgtaggatatgaagagaataaagatagagatttgagtaagtatgctcaatataaatattataaccatgatattaatgcaggactaaatattatccgcgagaaatatagattgaactttggagtatctttgcaaccgcagaacaccagattggattataagaaagccgaagtagatactgtagtaaaaagaaatgtgttcaattttgctcctaacgttgattttcgttacagattttctaaagtcagccagttgcgctttacctatcggggacgtgcaagccagccgagtatggaaaatttgcttgatgtaactgatgactccaatccgttgaatatccgtaagggtaatccgggattgaaaccttctttctctcattctatgcgtttgttttataatacttataatgcagataaacagcgtggcatgatggctcatgtaaacttgaatatgactcaaaatagcattactaatgccactacttataatcagagtactggtggagtgactgttaaaccggagaatatcaacggaaactggaatgcgatgggaatgtttggattcaatacagcattgagagacaagcggtttaccataaattctttttcccgtgctaattataccaatgcagtttcttatctttttaatgacgatattaaaataaatgacaagaacactagtacgacactgactttcggagagaatctgaatggaactttccgtaacgactggtttgaatttaccttgaatggttcaatcaactataactttgagcgaaatcaactgcgtccggaaaacaatcaagaaccctatacatttggttatggtgcaagtactaatatctctttaccttggagtatgacgttgtctaccaatatcactaataacgctcgtcgtggttatcgtgatgccagtatgaataagaatgaacttatttggaatgcacagattgcccaaaacttcctgaaaggcaatgccgcaaccatcagttttgaagtatatgatattctgcggcagcaatctaatatcagccgttcgttaacagccgatatgcgttctgtttctgaatataacggaattaatagctactgcatgcttcgtttctcttatcgtctgaatgtttttggaaataaagaagctcgtggcaatatgcgtcatggcggttttgatggtggtggacctcgtggcccgcgtggtggctttggaggtggcagaccacactaaagcagagtaataggtttaaataaaaacaggaagtcccggcacaacgattcaatgttgttgccgggatttctttgttaatccgagaatttactctatatttgttgtttagtattcgtatgaaaggagattcctatgattgattggaactatatgcttagccagatagcaacagtggcttttgatattctttattttggagccattatcggtacgattgtcatcatcattcttgacaaccggaatccggttaaaaccatggcatggatactcatattacttttccttcctattgtcggacttgtcttttattttttctttgggcggagtcaacgtcgcgaacgtatcattgggcaaaaaagctacgaccgcttattgaagaaaccaatggccgaatatctcgcacaggattgttcggacgttccttatgaatactcccgtcttattcagcttttccagcaaacgaatcaagcgtttccatttgaggggaaccgtgtggcagtctataccgaaggatatactaaacttcaatcattgttgcgtgaactgcaaaaagcgaagcagcatatccacatggaatattacatctttgaagatgacgctatcgggcgtatggtcagggatgtgctgatagaaaaagcttctcacggggttgaagtacgggttatctatgatgatgtaggttgctggcatgtgcctaaccgtttttttgaagaaatgcgcaatgccggtattgaagtcagaagctttttgaaagtacgttttcccttatttaccagtagggtgaattaccgtaatcatagaaagattgtcattattgacggacgcgtgggcttcgttgggggaatgaacctggcagaacgttatatgcgtggcttttcttgggggatttggcgcgatacgcatatcatgttggaaggcaaggcagtgcatggtttacaaacagcttttctgcttgattggtattttgtagaccgtacgttgataaccgcttcccgttattttccgaagattgactcttgcggaagttctttagtgcaaattgtcacgagtgagcctatcgggccttggaaagaaatcatgcagggattgactgttgctattaccagtgcaaaaaaatatttctatatgcaaacaccttattttttgcctacagaaccaatattagcagctatgcaaacagcagcattgtctggggtggatatacgcttgatgttaccggaacgtgcagataactggataactcatcttggatcgcgttcttatttggcagatgtgatgcaggcaggtgttaaagtctatttttataagaaaggttttctacattctaagctgatggtttcagatgatatgctttccactgtaggctctaccaatgttgacttccgtagctttgagcataactttgaggtgaatgcttttatgtatgacgtagaaactgcccttgaaatgaaagaaatatttcttcaggaccagcgcgaaagtacacagatctttttgaagaattggggcagacgttcgtggagacaaaaagctgcggagtctatcgtgcgtttattggctccgctgctttaataaggatgaaattgtatttggatcttatctgaatagtgagaagttcacacttccatacacccttctctcaaggaaatgtggattttcttcgaaattattatcttttccatgctccagtaccaataatcctccttctttgagaagattattctgaaagattaattcgggtattgtttccaactcttttaaagcgtagggaggatcggcaaagatgaagtcgaactgttcgcggccatttttgataaacttgaatacatctccgcgtatcggcagacatttgtctgtctgcacctctttcataattttgcagatgaatgagtgatgtgcaggatctttctcaatgctgataacatggtcacatccacgggataccagttcgatactgatgcttcctgtcccggcaaacaaatcaagagctgttattccttcttcaaaatcgatatagttattgagtacattaaacagattttctttggcgaaatctgtcgtagggcgtgctttaaatgtccgaggcacgtcaaatcttcttcgtttgtaaataccgctgattactcgcatgttaataaggcttgcatgtcaatattagttgcaggattcatgatgaatacctgtaggataaactttttcaattcactcattaaaacgtctttttccggaagtattccggttaggtgtaactcatcccgttcctgattaaactccagttgtttccaggcgtacaataaatagtaaatacggtcttctgtgtgcgtacattcaaaggaattagccagaagcagatgtcctcgttcaaagcaatagatgtcaatgccgtctttgcgtatagaagcatacatcttcttactgtttcccaatctgctttttacagaaaaataatcgatgaatggagtagattgagaatagaaacgagcttcgggatattgttcattcaaaaaggtctgtgcgcttttgtctatgccgaagatgacagctacattattctttcttagaatattatagagcaccgtttcattttcttttttctgatgattatgataaaacagaagttccgcctgttcctcttcaaacaattctaatggcacaatcgtaaaacgcttgcctgccatcataatgtttactcgtttgtaaggatgattgaggaaatccgattcgtgaaagagtgtctttagatttgctgtaagggatgaagacgcatctatccctttctctattattgaaagcgaatcgtcatgaatcgggttatagatagaaaaagaaaatccatccgtactaagacggatggataaagtatattgttttgatttagtaaaatcaatcattattcccagttaccagcaccattgtttggagtatcgatagaacctaccatcaagccgctatatttgcctagtttagaatccaggtcttttaggttgatgatttcttgtttgtcaagtccgctcaaataagtttcgtatggagctttcacttcgaacaaatataccggagcaccagacttggcagtgtcatttttcacgttcatttcgaattgagcaccatttccgtgaggaatatatttcatagagtcggcattgaatccttttggatagatagtatccaatacagctacccacatagtgtcacgtttgaagttttcaagtccccatttcttaacttcatcgtatctaccggttttctttgctttttcgatgatagccatggctttcttttcagtcagtccatcttccaattgcttgtcagttaacattcccatcttcataacgaacggcaatttttgatttttaacgaaatcaatcagtgtgtctaatttgggtgcatacattccgcggtgcagcgaacggtattcctgctgtgccttacggatgtcgatcaaacgggcaatgactgctttttctctttctttttttgcgttttcaaaattgataggacccataatgctggtgtaacagatgtaaatcagtgcagcagcacaaagcaccaatacaatattaaatactgttttcatgataaattatgtttttagttgttatattcgcatcgcaaaaatagaataaataaatttaaatacgatagttcctcgaacttttttctcgtacaaaaatgataaataactatttagaaaggcaaattaaggaaaattttccttatcagccaactttagagcaggaaattgctgtaaaatctctttcagagtttctgctgtccacactggcagatgaagtctttatcttaagagggtatgctggtactggtaaaacatcgttggtaggggcattggtgaaaacgatggatcagctgcagcagaaatctgtattgttggctcctacaggacgtgcggcaaaagttttttcagcgtatgcaggacatccggcttttactattcataaaaaaatatatagacaacaagctttttctaatgagcttagtaacttttcgatcaatgacaatttagctaccaatacattgtttattgtcgacgaggcttccatgatttcaaacgaaggactgtcgggcagtatgtttggaacaggacgtttattggatgatttggtgcaatttgtgtattcgggacaaggttgccgactcttattgatgggagatacagcacagcttcccccggtaggtgaggagttgagtcctgcgctttttgctgatgcattgaaaggttatggacttgaagtacgtgagattgatcttacccaagtggttcgccaggtgcaagaatccggaatattgtggaatgccacgcagttgaggcaactgatagcggaggatgattgttattccttacctaagataaaaataacaggttttcctgatattaaactggtacccggaactgaactgatagaagaactgactaattgttacgatcatgatggtatggatgaaacgattgttgtctgtcgatctaataaacgtgcgaacttatataataatggaatacgtgcacaaattctttggcgtgaagatgaattgaacactggagatatgttgatgatagccaaaaataattactattggacagagaaatataaggagatggattttatcgctaatggagaaattgcagttgtccggcgtgttcgtcgaactcgtgaaatatacggttatcgttttgctgaagttactctccgctttcctgaccagaatgattttgaattggatgcgaatctattattagacactttacattcggactcacccgcattgccgaaagaagacaatgaccgattgttctatacggtacttgaggattatatagatattccaaacaaaagagaccggatgaaaaagatgaaagccgatccgcattacaatgctttgcaggtgaaatatgcatacgcaataacctgtcataaagcgcaaggcggacagtggcagaatgtgtttttagatcaggggtatatgacagatgagtatttgactccggattatttccggtggttgtatacagcttttactcgggcgacaaagacactgtatttggtgaattacccgaaagagcaggtggaatagttttgttttttgaatgactcttaatctttatatgatttagagttttaaggttacattgattatataatcagttgatttcaatattgttggattcaaaaaagtctttgagtactggttgtggtttgtttatagatgaaaagagtattttaagataagagctagcattagataaaaatagatagcaataatccctttatttgactctattcacagatttggaaagagtaaataaagggattctctataaattatttctctatatattaattatttgtaaacaatagtagttgcatcattcttagttaactttggtatcacttgaccagtctttaaataaagagtcttaattttgctgctacgattggcgtttaagtttgttaatgctggacattccgaagcatcaattgacgtaacataatcataacttgcataccaggaaacaagacttaaatccaaagactcaagtttactactgatgactttaagactttctgcctccgaataaacattgctacctcctgcattgaaactagtaattggattatctcccaaattatactcttcacaaatagtagggctattaaatgtgagtgatgataccttatgtaaacctgaaatatcaagctttttcatgtttgaacaataacctaaacgtaatgaagtcaggttagggaaatactctattccggttaaatctttaatctggttagagtatgaggtgttagagaatgaagttgcgtttaatccttcttcaagaataatacatttggtatcatcaatagggagagcccaaccgttagatatacaaagtgctcgaagaacggcatctggaatttccacagggctggcgtccggatctttttgaacaatagcaatatcttttactaatgtaccactggtttgggcaatatgaattgtacctccacgcgaagctggtgatgcggatagtttataagtaacagtaaccgtagtcaaaccatcatcgcctttttgtggttcggaaattgattgatcagtaatccaatctttcccttttgttatggaaatagcgtaattgacgttgtatttcactttaaaagagatagttcgtgctgttagatcatatgttaaagtgttactttcggtgataattgcatctgtttgtttttgattaatatctacattgacactctcagtaacgagtgggcttgagattgtaatttctgtactacgatctttatatgtcttgttctcggcagcagtgaatgataaagttactttaccaccaaattcattacgtctatcaaatgtcagccactcttcaccaccgtcactatatgttatcgttgggtcggtcacattggtattaagttgaattctcacagtacttttctctttagcaatagaaagagcttcgtcagaaagtaaatccattattatatatgcaggttgagactctacttgcagtggcacaaccgaagaacctgtgaaaaatttgaaggttgcagtacgcttttcatctaatttgttaggatcgatggtaaaagtaactacatcaccatctttacctgaagttactgacggatgtgcccaatcacatattcctgacagccgccagttatcggagcttgttacagttactgtagcatcccctccatttttatccatttggagtatattggtcgatagtgagattgttgaattaccactattgattgattcatcatcatcagaacaaccccatagtaggagggatgccgataatattatcattaaattcttatataatttcatatctattctttttaaggtaaaatatacattaatcagttaatagcttcacgttgtgtactattctttttataatagtaacttggataaattaatgtttcatcgtacaaacctttacaaacggattggcatctatatacttgtgaaccatataatgatgggtcaagtgcgaagaacatgtagtatccataaccagcttcttttctagaacgcgctgtagattcacttgagttgccactgcctcgtcttagttctattgacataccagcacactgtttcaatgtcataccggtacctggcccagcagcaccaccatagttggctacagcataatcgcaatactgaccaggttcgataccatcaataacttggagactacttgaatacatgttgccaaggttataaagtgagacaattttttccggcatgacagctttacattcatacattaatcgtgaacccgcataggctgatggtcttgcaagccatgggtttgaaaggtctggtgagttcgaatattcatcatcgaaagcgacgccgtccagattataggcacggcagtaggctgccagttcccgggcgaattcccgggctcccatatccgaaagttgagcgacaccggcttcgtcatgattaccaaggatgctgataataattttcataccagctttacgcaatggttgcagatacttatcattattgtcgagcaagaattgaacattttcattgttcgctaaatacactcgttgtttctctggatcccaattgatattagcagcaaaaagtacgatatggtcgaaaaaatatttaccactttcagtcagaaactcaagtgcattgagtgggttagtatcattaacttcgaaatagagtactgtttgtactgcatcttctcctttgttagtattgggtttgttgcgataatcctgaacgagaagcaccatatgcttggaagtttcagtaaatgttactccttcagtagaagatgttactgtcaaaggtactatgtaagttttatcctcttccattccatcaaacgcagtcagtgtaactttcacgcttggggtaactttatcatcaggggcaagtacaaaagtaccattatttgcgattttcacattagcggcaggaaacacttcgaaatccgtttcatgggtagtattatatatagctgcatatgattcctcgacagctatttgaacatctactcctttttgaggtagtttagagagacggaataccacattagtgctgtattcattatttcggagctcgattaccgaactgtttttattcgtattttcgtccaataataatccgctcagttgagtcgatgccaaataagaagattcatctatcttgtttcctatttcaatatcttcctcacaagatgtgaaggttgccatagtgaacatcaccattggcaggaaagcatatttgatattatttatcatattcatattcaattcttagttaaatgatttattattgaggcaatgaaacagattcccatttaggctctttttcgattgtcaaatcatagccactcacgctgtaatctttagctattgtacccgaaccttcgtcgaatttccaatatgcaatgagcccttccgattcaggttctactgtgtagaagtggtttgttgcctgaatttcttctgctgttaatgcacgattccagattcgtacttcggaaacgacgccatcaaaatagcggtcatctttataggaataacctacccagaaacaacgtgaaccgtattcctcattggtatgtttggcaccaagactaacagaactctttcctgttgaaccggaaagcttttctacgccattgatatatactttgacattacctttattgaatgcgacagctacatgataccacttgccactttcaagttgaaggtctgcgcttgtacaattgttaacagaagtagctacttgaagttggttattcggaatatttgcgtcaccgatacgaagcaagtaattgctttcaatacccatcaacgtgttcagagtattagggaatgaattggccttgaacagtatctccatcgtattctccgttagattattgaatttggagtcattcttgaaatccgggtaagcacgattacgactgatattacataccacattaataagtgatgctccgcggaatacataataatatgttttagcactttgcaaaacgccgatcccttccacggatttaatagtgactggaagcacataagtggttttgatatcaagttctcctgtattaatgaattcaatcggcaattctggactaactatactacctgatttgatggtagtcgaagtttctggcattgaataatgctcttcggaaagaagtactgcagtttcatcataatatgcctgtttataagttgataaaagttcgggagcaggtgacatagtcactttgatatcatgtttttcaggctttgctatggctactgaaagaccagtttctacatttgtatcaccagccttgaacagtatttccttagtaaagttcgatgccgaaatgaagagtttattgtcataatgctgttcattttcatcgttgttctggcaaccggtgagaattattgagaaaccggcaagagctgtaaatattaaattgtttaatttcataaggcagttttttatttaacggttggactcaatatacttatagcttcttttaaggttgggtatacattgctggcattaaaatagtctttttccgctgcatcaatcgaaatcccagctttggtgtagtcaggcgtctttgccactgcccattgagcagctccaatgatggcagatgagccatctccgagttcaccattgtaactccccgaataggtaagataaggcgttgttactcccatgatgaagcggtcggttggtacgttttttgctgatgccatgagtatgagataagacatctcgtattggttttttgctccatgcgcattgacaatgatgtatttacaatcagaaagcagatttttaccaataacattctgcggggaacctttgaaaagcaagtccttattagtattcgcaactttccagttagctaccgcgtcaaagaatgctccttgacgcgctgtttcagcggcaatttcattctcttcaacaagcgaattgaggtcgaagcctgtataattcactacaattccatctacatccaaagcgttacttgcggcgatttgtttagcgacctcacttttacagtattcaataaaacgtgttgcatcgtcgacagtctcttctccttcttctccattttctgtttcatcagattcgggattaggtactgcgttggctgcttcttcctcaagaatctttttccatgtactttctatagcatcgaaatcaactaatcccaatacttttgtacccaatcgacgtacttccttcatctcagatatatttgcctgatttacttccattgtattgtttaggcaaatatagtcgagactgtcaggcatatcagtaaggtgttgactgcgtgaggttgttacagtacttacattattaactgaaacaattactacctgatggtctgttgctttaaaattgttgagagattccaggtattgagcataaagttccggattttgttcctccatagaaggagtatgtatattgatgctttctgggtctgtccagtcagaacacgagaactgcatcatagagcatgccagcattacaggcatgagatattttatttttcttctcatatatgctataattaaggtaattttatttgtataatttaatatactaagtacttggtatatatttttattttttgttactcattggttgatttatttacagtcccaccatacgtgagttgccatcgtatctcctcttttagtcttggactcttgtgtcaatgtcgcaactgctgcttctacgctttctctattttcacgatattcatcagttggatatggcatgcgtcgtgcaccttccgcatcattaacaattcctccacttgcatttgctgccattggcattaatttaggatagcctgtacgacggtactcagtccatgattccataccattcggaaagtttgcaatccatttttgagtaataatctgttctaagcttttttcaaaatcacctccagaccatgccacagttacatttgtattaatagctccagagtaatcataagtttgggcactttgtcctttcagtggatctttatatgcttctacttttcccgtacttgcaagataattttcgactccactggtaattccgttttcttcaaacgacaaacggattccttcctcatagaagtctttagctgttcctcccatgttccagttacgaagagctccttcagcacgcaagaaagcgacttctgatgcacggaacacaactatattatcactcgtagtgactttcatacaagaagagccttgtgaccaggagttatattgtccttgcagaataccccgacgtaaacctacataactttcttctccagtatatgcatttcccgacacggtgccaaaagtacttttatcataatatgcttcgcgacgaggatcgttgtatgcattcatgtagcaggttaaatccgctgaaattcgtgcatctgaccatagtaccataaaacgttgccatggattatgatcggcaactttacgataagcgccatcagttgcagcagtcataacacctgctgctacagcttcttcagccaattgctgtgatgtttttccattcacgttaaatcctgctacatagcaagtacgcatcgccattcttagcttcaaagagttggcaaacttataccatgctgatgtattgccattataaattctatcagcacttgagctgaagctttggttaccaaactttcctaatactgtaataatattatccaaatcttctagcattttggcatagacagcttgctgagaatcataaggggatttgatcgcattagctgcacctacttttgaataagggatgggaccatatgtatctgttacacgtaacattacgacgatacgatataactcggccaacgataagaaaagttcatcatcgctttgatttttcaaattgaagtaatcaggataaaactttgaataaaaatcattgaatggaatttttttccaatcgtctgaaggattataagttgcgtaacgaccagaccaacctgtacccaaattggagtctgctacatatcccgaaaatgctcctgccatcaaacagtctacatattgagaaaagttctcttgttctggcatcatcaaatcttgtaaattaagagctaatgatcttaccaaataccaatctactcccatgtcattttggtctggttcatgaggatttttattgtaatcttcaaagtttcctgtacatgcagttgcaccgaaaagaaacataccagtgactataaactgtattattgtatttttcttcatcttttccgtttttagaatttaagtttcaaattgaatcctacgctacgaaggctaggcatcataaagtaatcaattccctggtaatagttacctgtagtggctacagattcaggatcgaaaggagccttgcaataaatcatccacaagttacgacctaccagcgaaagagtgatatccataatatttttcaatttctttcttgggatagtgtagctgacagaagcttcttgcagacgtaaattggtagcactataagcgtaatattgaggaataccgctgtcggcaccaaccactgtataccacttttgcgcgtcaatcatatcgttgccgtttatcacgactccaccattatcacgagctgctgctgtagcttcggatacaccataggagtcaagaacggcttgagtcgcagagtaaacgactcctcccaaacgggcagtaagaaggaagccaagtccccagttaccatattgaaagtcattgcgccatgccatattagcttttggaaaaacagatcctaaataaatatcatcagctttgtcattcactgctacatttccatcggcatttacataaatcttattatttgaatctcgaagcaagtcagactgtgagtagagatcacctaaagatccacctacttttagaatgaaccgtgcctttgataaaccacctacatccatacggtcttttgttatttcttcaccggttacagggtttatgtaaccatcaatcaggcttaaaatcttgtttttattggcactgaatgtgtagttagaactccatgaaaacttgttccatgtattcttgtaaccaagtgaaagttctacaccacggttacgtacgttaccagtctgcgcatagaatgtactatagcctcctgttggagaaagctttgcatccatggtttgattgtaagtcttggtattatagaatgaaacatcaaaattgaaatgtttaaggaaacgtgcagtaagacctacttcccaagaatctgtacgttccggtttcaaatcatacaatggatatgcagactgagaagagtatgctcctgttgaagtattccatgaaaaagttggataagcaaggaagcgtccaaatggtagacctacggatgcccaagaagcacgtagttttaagtatgaaatactttcaggtaatttgaaaagttcagacaaaacaacagagcctcctactgacgggtagaaaaaagaagactgttttgagttcggtcccgctaattgacttggccaatcattacgtccggtaagagtcaagtagtaagtacttctataaccaacttctgcagatgcaaatatagattgtgtttgttcacgataaccagtttcttcacgtttcccagtttctttatccaattgagcaactgtgaaaaagttaggaagtccattcgctgcaattggtccactaacggcaagagcttcagaacgattgtctgaataagatgctccgatattagctgttaaactccaatcctcgccaaatgttttatttatattcaacaataagtctgcatatgtttgcttgtcacgagtgtttgttacaccataaaaaccattttcaccttcagcaatagttgcgatggtagaggcatagtatttttgtgtatatgtgttgtatgaattatctagacgtacacgtccagctacgttcaaccaacttagaatatcgtaacttaaagctgcactcaacatataacgatctttgtcattttcacgcaagttacgataattaatccagtaaggattttgtaaacggaacgatccccctccttgaggccaatattgcgtatacatattacgctctaaatcataacgttcgtacattttgtaatcttcccagtcatttccacgcggaaacaggtaagcagaagacaacgggtttgcataaataccttgattcaccatattacggtctttctgcataatatattgagcaccaacatccagtttcatcttatcttctagaaaaagagtggtgttacggaatgtaaagttatagcggtcgtatttgttatttggaataatgccacgcgaattaacggctgcggcagaaagatatgtctgattgtgttcagtaccagtagaaagtgttacagattctgttccaataagcccagtctgaaaataatcacttgcaggatcgtatccgcggtaattagcttcattcaatcttttaccccaactagcatctgttccagaagttccatagcgattctgaaactgtggcatgacgaatggagataacatttctgtattactagatacggtcaaggctacacgacccacttttccttttttggttgtaatcacaatagcaccattagatgcattgctaccatacaatgcggcagcagcggcaccagacaaaactgacattgattcaatgtcatctgggtttatatcagctatagcttctgtagagccttgcgattgcatctcttcagaaccaccagaagcgctcaggttatacattggaataccgtcgataacataaagagcattagacgattgttcgatacccctggagccacgcataacaactttacttgcaccaccaataccagaagaagaagagttgatatttaaacccgcaacctttccgttcagtgaattaataaagttcgcatcttttacagctaaagctgattctgcatcgacctgtgtgacattataactcaaagctttctctgaacgcttaatacccaaagctgtaacaactacctcgtcaatcacttgggtatcatccatcatcgtaatattaatggctgtctgtcctttcaaagggatttcttgtgtcttatatccgatataagaataaacaataactgggttattgctttttgtcacaattttgtagttaccatccaaatcggtaatagctccgtctgttgttcctttcactaaaatgctaacaccaatcaatggttctcctttagcatctacaacttgtccggttatagtacgttctttcccgctttgttgttgtagtgaatcggaattttctttttctgataaataaattatattctcttctattttataagagatatctttatttttcaaaagtgtgtttaaaacttgctctaaagaagcatcttttacttttaaaggttcaactgtgacagttgatagcttgtcattgtagaaaaattggtactttgattgtgattgaatttgtttaattacagttcctaaagttgtacggggagttgataaggtcaactgtgccgcagcccattgtacaggaactgctatcaacaaaagaatcaataaagctcgaaataacttcgactttcgaagcgaatgtttgctttccatacatttaatttaatggttatacattttattaaactcaaaaagaagagtgtcgactttcccttcctttgttaataaaacaatgctaatataataaacacttagtccattttctcttttttttcgaaaaaagtaagaaatatctgatatctccttgaataacctatatttagaatttaccaagtacttagagaacttggatgaaaataatgtgattaaaatctttaagtgataatatatatgaaaagaatagtaaaaaacagtttgtttacagcaatattgatggtgtgggggatgatgtattcctcatgcgaaggctggacagacccagaaagcattaacatccattaccctacatttgaagagcaaaacccgcaactgtatgctgactatatcagagatctgaaacgctacaaggatggagaacataagttagtctttgtctcttttgacaatccggaaactaatccaatcaatcaaaccgaacgtctcaccgctataccggacagtgtggattttatctgtttgaataatccagaaaagctctcgtctgaaacacaagccgaaatggtaaaaatacgcgagaagaatatccgcacgctttcctgcattaattatgagagtttagaacaagaatggaacaataaggcaaaagataattccgaattgacggaagaagatgcacaaaggtatctgaatgaacgtacggatgctatgctggttctatgtgacaattatggatatgatggtatcctaattgactatacaggactttcaatggtgggtatgcaagaagatgtgttacaacaatacaaggcacgtcagcaaaacttcttcagcagagtgttggattggcggattaagcataccgacaaaacattggttttttacggttatgtgcagtatttggctccagaaaacatggatatgctggataaatacaatcatctgatactgaaaaccgcttcttccaaaaacatggaggatctgacattaaatgtttttatggctattcaagcaggcatagacgtagcaggaacgaatgcggatcttgttccaaaagatcgttttattgcctgtacacagtttcctcaacaggaagataaggatatgataattggttattgggatacacgggatgcaaatggaaataaagtattggctgcacaaggtacagctcaatggattgtacaggcatcaccagattatacctgcactggtatttttatcatcaatatccaaaaggattattacaataatacttatggaacagtacgtgaaactattcatataatgaatcctaataaatagaaatacaatatgaaattgcatatttatcaattagcatttatagcacttactgcatttacggtaagcagctgcaaggatacggatattaatgatgaacatcattatgacaataagctttatataagttcggtacccgtaacagaagatttactgattaaagaagatgtattgtttgacagtcgtaaaattacttatcggcttgctgctcctgtcgacaacgaaatccaagtcagctttgatgccaaaccatctttagcggctacctacaatctaagttatggagataatgctacagcacttcccgaagcgttttatgatattcctgtgaagaatgttacgattcaacccggaggaatttctggagatgatatcatagtgaatttcgttaatttgaatcaattggacgactcaagacgttatgtgttgcctgttacaatcacaaatgtatctggaattggacttcttgagagtgcccgtactacttattttatcatcaaaggcgctgctcttattaatgttgtagctaatattaaagaaaactattttccgataaaatggaatagtgatgtaagcaagatgactactattacagtggaagcattggtacgaagtgatgactgggtggccaaacgtgataatgcactaagttctgtttttggaattgaaggtaatttccttatacgtatcggtgatggcgaccgtccacgtgatcaacttcaggcatttgtgccaggtggaagttttcctccagcaaatcacgcaccaggtattggacttccggtagacgaatgggtacacatagctgttgtgtataacactgtcaataaaaaccgaatctattacaagaatggtgtggcggtgtataaagaccagtcagcaaatagtacggttaatttaactaagaattgctatataggccgttcttttgatggtacccgctggcttccgggagaaatttcagaggttcgtatttggagcgtagaaagaactgcagagcaaattgcagataatccttataaagtaaatcctgccagtgaaggacttgtagcctactggaaatttaatgaggggtctggaaaggttgttatagatcgtacaggtaatggaaatgatatcactgcgagtaaagatccgatatgggttcctgtagaacttcctcaaatatattaatccttttaattaaaaagaatattattatgaaacaaaaatatctgataacagggttgatggttgccatatttgcaggcggcataacttgccttacctcttgtgatgatgatcttgtcataaataaagcaatagatgagtcagcatatactggcatttatgaaaacaatggatacttgcgtgacggaaagtccaatttgtcctctaacgtagtggagctatacaaagatacttatactacttctgtaaaaatgagtcttagtaaaatggcgagtaccagtacttttgctcaagtaattattgatgcagactatttggatacttataacaaagagcatgaaaccgattttgaattgtatcctgcgcacttggtttcttttaagaatgacgggaagcttattgtagatgcacaaacaaaatctgctcagactgacatcaccattcagacggacggcactttgaaagaagataaaacctatgctttacctatagctcttacccacgtaagtagcgacattaccataaaagatgagaaagctggtcattgtatctatttgataaaagatatgagaaagctgggaaacacttacaaaggggaagatgtagtaaagtcatttgtcttctttgatggtacaaatccactgaatgctctttcttttcaactggaaaacggaaaattgctgtgggatgtagtatctccatttgctgccaatatcaactgggacgcacaagcccaacgcccttatttaaaatgtaatgcttacatacaatatttgctagataataatgagaaatttttgcaaccacttcgtaaacgtggaactaaaatagtattaggaatacttagtaacggggatataacaggagtggcgcaactttctaaacaaggtgccaaagactttgcacgagaactagctcagtattgcaaagcatataatctggacggggtatgttttgatgacgaatatgaaggtgcttatgatccgaataatccagcattaacagagcctagtgaggaggctgcggcacgtttatgctacgaaactaaacaagcaatgcctgataaaatcgtagcagtatatgcattaagaagaatgtatagttcgaaggcaaccgttgttgatggagtaactattaaaaactggatagatattgtagttggtgattatggtagagatccttctcaagttccgtatggggacctgacatccaaagaatgttccggtcaatccatggagtttgttagaggtacaggtggcgatttacagggacaaagactgataaaccaaggttctggatggtttatgggcttttcaccgaagccggaaaattatggcaatgtattccggcgtctgtctgatgtgagaactctgtatggttctccgttacaagcacctaccgtgttctacaaagacaatgatgccacaccttaccaatatcccgatgatttgcaataaattaaaaaacaattgtagaaatgagaacactttatagatttttcttattattggcagtcggttcgctgacagccctttctggatgcggcgaagatgaaactccaagtctggctacctatccggataacaatttttctcttgtggcggaagacggagaaggctcggaaataacagtgaatgccacctataataatgagggtatattagaattcgataaacccgtaatattcacctttcgttttaacgcttcacccgaggacgcaatagttacttttgagccaatcggagaagatgttgagttaagtgataccaaattgataattccggcaggctatacggatgccagtgttactttgggtataaaaaatatggatgtttttcaatctaattacgatgaagctacctgtaatttaggagtgagagctactgtgcaaggatataaaatgccatctattaccttggaggcaaaagctttgataaagaaagaggcgtatgtagctacaggtttcttggaaggaaaagtcggtaataaaactacattcgaacatacttatttcaacggagaatttaaggacacggagcggaatctatatacattcagtgtacaattggatcgtcctgctcggaaagatgtaaaggtgaaacttacaacggaaggagtggatgacgaatacctgaaagacattagtattactcctgcagaaattataattcctgctggtgaaaagacatcaggagatattacttgggagattactaatgactttttgttgcgtacatcggacgactcgtcaaacacattaaatatcacagctgtttttgaatgtgaagatccggtcttcgtgcaggatgagaaaagaagttctttcaccttgaatataaataaatatataagaggatttgaacacatatcttacaaacggccttccggttggatagaatgggccaaacagggttggtctgtagatgtggaagatagtagtgatttttatcaaaacgatggtggcggttcgcttattgatggtgaaaccaaaggtaactatgaaggtatatgttctgatggagatatttcatttacactcgatatgggagaggaaaaaacaatcactggagtaggtcttgattatatatattattatgctcctcaaaatgtacaattatcagtttcttctgatggaaacacatggaattatctaggaaaagtagctactgctgatgagaatgccgattactatcaattcattgaacctataactgcacggtatgtgaaatttgatcttttggcttcttggggatgtgagctttatgaaatatacgtctttaagtagtattgagtctaaaaagaatataggttaaagtttgtattcgagaggctgtctcaagattgtttttgagtcagcctctttttaattgctttttcaaagaatgggcaggcgctaacttctttaagtctaacgtttgctcatgttcctaaatatttgaattaaatgctacatagtgaaataaaatatctatcatagtatcatttatttcaataatcttttaattatcaaaggaataagtatgatagatagcttttagaaaatgcatctatcatacttttaccagtaaaaacaggttatctatcattgtgcaaaatagccatataagggtcataataggtgtaagatagcttgtttttgtcacaagggagccatataaatctgattatcgtggcttaataatgtaaatgtaatggcgataagtttatagcccacgtatgtgtgctgtacagtccgcatgtgtgggctgcacggtttacatacgtgggctgtacagcctgcacatgtgaactatagaaagacagccgcttccaatagattattaagttgtcaatacaggttatcatcctataaagtgtgcattcttatgcctttaaatggatactctcacctaatgctacactaaatagatatagtatgggtgtgatagatacccgttttttgcaataaaagtatgatagatgcattttctaaaagttatctatcatacttattcctttgataattagaagattattaaaatgaatgatactatgatagatgtttttctcactatgtattcaaacctgtatcattttactcatttccgtacggtgttgaaaccaatttttgatatgcttgccttgttttgtcgaataaaagcagcgaaagataataaaagcaatagcctgaaagcagacttctttgctttcaggctattactttcagccggaatattgatgaatagttactttctgaaaaatacagaaagactcaaaccaagattagggctaaattatctcgcaaggattattgttgcttagagaaagaatagggcatatcttcttctttagttcctctattctgattaggttgattactcatttcaacattgatcgtacctcccttgagcaaattttcgtgtcggagataatttttagtgtaatcagcaccattgacattcatcgaattgacataaaaattcttcttactattattcggagcatcaataaccaaactattgccattctcaaaatgaagtgtagctttcttgaataacggagcacctataatatattcatccgttcccggacaaacaggatagaaacctaatgccgagaatacataccaggcagaagtttgtccgttgtcttcatcgccacaatagccgtccggagtaggagagtacatacgatccattacttgacgcaaccagtattgggctttccaaggttgtcctgcatagtcatataaataaatcatgtgctgaatcggttgattgccatgtgcatagttacccatattcatcacagtcatttcacggatttcatgaatcacttggccgtagtagctatcatcaaaaataggaggtacggcaaaaacagaatccatcatggtgataaacatctcttttccacccatcaagtcaatcaatccttgaggatcgtggaatacagaccaagtatagtgccagctatttccttccgtaaaggcgtccccccatttcagcggagagaaaggagattggaatgtaccatcttcgttgcgtccacgcattaacttagattccttatcgaaaagattcttgtagttcatggcacgttttgcgaaaagattaatctcttttttcggacgtttaagttcctttgcaagttggtagatacaccagtcattgtatgcatattccaacgtgcgtgcggcgttctcattgatttttacatcataaggcacgtaacccagtctattgtaatattcatatcccaaacgtcctgttgatgatacttgtggatgtacattctccgttccgtgaatcagcccttcatacaatgtttttatatcgtccactttcactcctttcatgtaagcatccactaagacagaagcagaattgttaccaaccatacagcctctgtgccccggacttgcccattccgggaagaaaccgctctctttatatgtattgatcagaccttcctgcatttctttgttgactgacgggtacattaggttcaataacgggaataggcaacggaaagtatcccaaaagcctgtgtcggtatacatatatcccggtaatacttgcccattataaggactgtaatgaaccggttgtccggcagcatccagttcgtagaatttgcgtgggaagagcagtgaacgatataaacaagaatagaatgtgcgatattgatcgagattgcctccttctacttctatcttgcctaacacttgattccacgcttcttttccttttttggctagctgttcaatattatctttgcccaactctttcatattcaaagctgcctgttcaaaactgatgaaagaagaagcaatccttgcatgtacttgttcgcctttatgtgtttggaaaccaataatggctccggcatgatctgttgtctgttcggtaacattttcttgcagattaccattggctaccgtagctttataagtgaaaggcttgtcgaattcaataataaagtaatttttaaagttttcgggaactccaccgctgttgcgagtcgtgtaaccgataatcttgttttcttccggaataaccttaatatacgatcccttatcaaaggcatccactacaacatacgaatgatcgttttccggaaaagtgaaacggaaaagaacggcacgctcggttggagccatttctgtcactacatcatgctctgcaagatatactttataataataaggagtggcggtttctcctttgtgggcaaaccaactggcacgcttctcttcattgaattccggtttgcctactacgggcataatagagaattgtccgtaatcattaatccacggactgggttgatgtgtttgtttaaatccacgaatcttattagccgtataagtgtattgccatccgtctcccatctttcctgtctgtggagtccagaaattcatcccccatggacgggcaatggccggataagtattacctgttgataactcgaaactagattgagaacccataagcggattgacatactgcgtccagtctttggcttttgcaaagacgatacaacttaatgcacatactaataggagatactttttcatggtcttatttattatttatggctcaatcgaatcagaaatcaattgagccaatttatttttcaaggttttgtttttttattcaatttgaacagccagtagtaccaactcattcctcttttttggaggagagagccggagagaggactccccatttcgtaggatgatcggtcatcttgatttccattgttcctccattcgcaatatcctgatggttaaagaatggaatgtttagagccttaccgttcagcgatacactttcaatgtatttattctttttcccattattctttactacaatactgaaagtctttccttcaggcagattgataactgctttgtcgaaggcaggacgtccgatggaatataccggcttgccgggacatacttgatagaatcccatagagttgagtatataccaggcagacatctgaccgcagtcctcattacccgaaagaccatctatactgttggcatactggctccggtaaacactatctaccaactcttgagttctccaagggcggttaacgtagttatacaaatggattacatgatgactgggttcgtttccatgtgcatattgcccgataagtccgctgatatctgatgaggttgtctcaccttcaagtgatgaatcggccgagaataaggaatcaagtttctgtacaaaagcatcttctccacccatcagattgactaatccttctacatcatgcggcacaaaccaagtccattgccaagctgttccttcacaataatcatcgctacggtgagtagatgcgcgcggattgaatggagtacgccattcaccttttgaatctaatccacgcatgaagcggattgacttgtcgaaataaaattcgtacgccttggcgaagcgttcatactttgctttggattcaaaatcactcatcgcttctgcaaagatagagatacaccagtcatcatacgcatattctaacgctttggccactgattcgttttcgcggtcacaagggatatatccgatggcattcttataatattttgctttaggcatgagatgaggcaataccaaatccggacatttgatgccggtagtgtcatattcggcggcacgcaggcaggctttataagcctctttggtatcaaaattgcgataccctttcatgtaggcatccacgatgaccggaacagcatgatagccaatcatagtgccggtgtaattggaagccaagtcccacatggggtatatcccaccttcctgatgtttcttaattaacgaattgataaagtgattattcagatcgggatcaatgatagtcattagcggatgtagcgcacggaaagtatcccataaagaaaagacagtgtatatcggattaagggtgtctccttgatgtacttcaagatccattcctaaataacgtccgtctgcatcagtgaacagatttggactgattcccgtgtgatagagggccgtgtagaagatggctttatcttctttatcggaagttgtaatatcaattttggaaagatattcattccatgccgtacgtgcgtctttacgtactttttcgaaatcccatccgggaatttctgattcaacgttcttccgtgcaccggcaatatcgacagcggacacacctactttaacaagaacctgctcgtctttattggtgttgaaatgcaataatgctttgcagacaggaagtcgtttaccattatccatggtgatagagtccgtaacgagcgtataagagaatggtttggaaaatttagcgtagaagttgatatattggtcgaaagcccaataagttgttttcttatgtccacagatttccgtatcgcttattacttctatttccatctcggagttagtctgtcgttgcaggctgtaatccaggtcgatgataaatccggattcggtgttttcgggaaaagtatagcgatggattgctcctcgtttggtggatgaaaattcagctttcacctgataagtatcgagaaagacagaataatatcctggttctgcaatctcattcttgtgcgagaaagaggaagcgtatgccagtcgctggctttggggatcggttgttcgatattgttgtttacctacggttggcatgagcaagacatctccatagtcgcaacaacctgtaccactgacgtgtgtgtgagagaaaccattgatggtagagtcggcataataataaccggaacaagcatcccaaccatcgatccgggtgtccgggctgggctgaatcatcccgtggggaactaccgctccggggaaggtatgaccatgtccaccggtaccgatgaaagggttgacgtaagcactatagtcttttacattagtgggggctgtacaggagctaagtgtgaataaacctcctaaacatcctactattaggaatgtttttaatttcatggtattaatagcttttaagttttagccggttcatcttttacttcttatttgggagaaatgaagatattgtttccgacaattttataatcaataggtatagagttttgcaatgattttaacactgactcgatattcgatttccttttcagtacaccggagtaagttttacccgtctgaatgtcaggagatagaatgattttcacatcatagaaacgctccagcgctttggtgatggtgaagatatctgctttttggaatggaatcagattatcgtgccaaacagcatccaatttggcatccacttgtttcacggtcaatcgtccattatttttgttcagttccgcacgttgtcccggagtgaggataatctgcccctcttccttattgccttttacttcaatctcaccttcaataagtgtcgcctccgctatccggcaacgcttatcggattttaaattgaacgtagttcccaatacgcgtacgcgtattgcatcactttgaacggtgaatggcttatggcggtttttggtgacctcaaaataagcttctccttccaggtagacattgcgttccttttcggagaactcacgtggatatttcaaggttgctgcattgttcagccaaaccttgctaccatccggcaagactacctccttaacaatgccttcgctggctactgcaaccatcatttgttgattgtttccgctttgatagaaccaatatccgactccaccacccatgaccaacattgcagcaatcactgcggcatatttcatccagcgatgcatgcttagtattttgctctgtttacctttctcttcgtccagctttttatagagttgtttttccgcacgaagtatccgttgttcatcagtgtactggtcgaatttacccaaatgataaatttcttccatacgaaagagctggcgggcgttttcttccgattccttcatccaggcattgacctcgataagctcttcttcagaacactgtcctgtcagatatctgtttattatttcttcactcagattactcattttcttttccttcatattagtaatacaattcaaaacgcaaaaacacttatcctcaaatccgcaactacgcgcctaatatgatacagaagcgaaaagaatctgcatcgttagtaaaaagggggcacagtgcatcgaatgtcaccataaagacatataaatgccccttaccccaccatgcgacttgaggcaatacgcaaaatcacgactataagttgtcggtgttatccaaagtcattctggaacacattggcataagcattgttgcatgaatagatattcagcacatacttccttgatgtcctgacccatttggctggcacagagatgaacttaaagacaaacgtcttgatgcggcttgttgctttgagtccgaacctcttcacgtcaagcctcgccatgatgaatttatagaagttgcgtatgagtgccataagcagaagaaacaccgtgttttctcccataaaggattttggaagcctgttccagccgaatccgttattcatatcatcgaagatgcgttccttccctccacggaggttatagaattcgacaatctctttctcggaagactcgtagtcatttgtaaggatgcagcggtaggtgtattctccttcccacaggtcgagttcgccgtctatccgcttctgtctttgaatcacaagacggtatgccttccctttccatttctcgatgagaatggaggccagctcaaactcaatgccgcccaattccactttcttccaacctctgagggcaaagatgtcattgtagagcgaactgcatcggttagcacggatatagaaggtcttgcagtgtttagcaatctcttccactatctcttcagaacacgagccgcaatcagctctgaaacggttgataataagcttgttttgttcaaacctttcaaagaacctcttcagcgtgtccttctggtggaaacggacatttgtgttgccgtcgctgttctcaatgccgacaatcaagttgccaataaccgccacgccagggcgataaccaaggaacttcttgtatgtaggcttcgcatcaaacttctcagcctctatgaactggtggtcgaagtcaacgtcatacccctcgccctctttcagctgccctgtggacaataggcaattgaggagcagtgtattcagcttgtctgccgtgttgaagtcgtaggtcttgccagtgtcggatgtgtaggaaatgttatcctgggtcagttcctttatggctctaagaatcgtgtcggcactgcatgtgcgaagtgtcggatgaagcgaaaggtggtacatcagatgagtggtgacatcctcgatgcatgagccgccacaaaaataaacgctcataagcgaacggatgatttcgctgtattgataaccatacagcctgcatctcataccgagggttgagtcgattacagatgagagtctggagtcaaattgctccattattgaaaatattcctccaaaaggagtgagtttctcggatttaattgctacctttgccatgtctgtcgggtttgatacatattttgatttgcaacactaagataggtgaaaaatctgacatggcaaattcctgagcaactttttgttgctcaggtacttaaaaagttatatttgtaatagtgttgcggaattaaggcttattataatcgccataaaaataagaaaagaatcgcccaaagaggatcgagtcggccacgcaagtattttaaagccttatacatatgggcttccaccgtgcggagtgaaactccgagaatatcggctatttccttgtttttcatatcatgcagatagctaagtttgaaaacctctttgcatttgtcagggagctcattaattgcatcatgaatttccttgcggagttccttgtcttcgatcctccgaatcacttcgttgttgtccggttgatagaattctgcgcgtctttggttgatttcttccatggcaacacaataaccgtcttccacactgcggtgtttcaagacattaagggcacgggtgtaaacggcacgatagagaaaggcctggatttggtcgcctatctctatgtggtctttccgcttccataattctacaaatacgtcctgcactacatcctctgcttcttcttctcccaccaaacgggttgcatagaaaatcaggctgggatagtaccggcgaaatagtgctttataggttacatcaaagttttcattcattctctcgatggactaagttcatgtttcgtttatgggtttttatcttcgaatatgactccaattgctttaggggtgttactcatttcgaattcgacagtcgctccactcatgatttgctcgtgagtaagatatgttttgtcatacggttttccatctattttgatggattggatatagatattttctttgtttactttgggggccaatacggtgaaagtctttccatttgccagatgtaattgcatttccgggaataggggagtacctatctcatattttccactgacgggattgacggggtagaatcccatcgcactgaatacataccatgctgacatctgaccgcaatcttcgttgccacaaagaccggctgggtcgttcttgtagagctcgttcatcactttggccacatattcttgtgtgcgattttcgtgtcctatagcattgaacagataaataacgtgatggcttggctcattgccatgcgcatattgtcctatcatgcctgtgctgaagatcggaagttcgtcatctgctgccggatgataggtgaacatactgtccagtttttcggcaaatcggtttttacctcctacaaggtcgatcagtccgttaatgtcatgctgaacagaccaaaagtattgccatccgttgctttcgcaaatgtgtggtgtatagtcatcggccttgaagtccttgataaagatgcctttgtcgtcacgtggctgcatgaaagaagtagcggggttataaacattcttgtagttttgagaacgtttgtaaaattcgtccgcaatgtcttgtttgcccatcttcttcgccatttcggcaatgcaatagtcatcgaaagcgtattccagtgttttggataacgaccagttttctgcgttgtagtggtctgttacgttgtaaggtatgtatcctaattctttgtagagtccgatgccgcggtaattatccagattagccgttgctatgcaagcatccaaggctttctttgcgtcgaagtcgccgattcctttcagataggcgtctacaataacaggaacagcatgataaccgatcatcatgtctgtttcacttccgtagaagttccacaccggtaggcggccattctgttcgtagaaggcgatgaaggatttcaccatgtcgtttacacgttcgggttcggtataagtaaagagcgggtgggcagcacggtatgtatcccatagggagaaggtgctataattaacccagccgtcggcttggtgtattttcttatcggggccgtagtaagctccgtctacatcactgtaaatagttggagcaatcattgagtgatagagagcggtatagaagtttactttatcgttctcattatcaccttttatttcaatctttccgagctggcgattccagtttgcttttgtttccgccaagtatttgtcgaagttattttcggggacttcagcttgcaggtttttggctgctccttccatactgacaccggaaatggcagtgtttactaatatctgttcatccttttgggtattgaaatcgaagcgggcgataacagcggtgccgatacgtttgttatctttgatgatggcagttgtgtccagttccattttctcaaaaggcttggagaatcgggtgcggaaatagatgtgttgatcgcgtgcccagccgtcggagaaacggtaaccttgaatggtgacggagtctacgacttcgatatgagaatcgttggtaaaatcccagttcatggctttcttcagatttaagaagatagcagattgggcttccggaaatgtataacgttggataccacaacgctcggtggcagtcagttcgacgttgatgttataatcagtcaggcgtacttgataataaccggcatgagcactttcatccttgtgggagaatttagagtggatgccaagcggtgcttccgcttctttgtagggaagagtgacaggcatgaaagagatgtcatacaaatctcccgctccagtaccggagagatgtgtgtggctgaaaccggcaatcgtactatccggatagaaataaccggagatacggtcccatccgggcagtccgttgtccgggctaagttgcaccatgccgaaaggagcttgggcaccaggataagtgtttccagtgaagtctgttccgataaatggatttacataagatgtgtaatctatttcgtgtttttcttgcgtaggggtacaagaaatgagcatgcaggttaacagcaggcatagataagcaggtgttctcatcattctttaggtattagtgattacttattttatttatttgaaggataagaaaaataattaatctggtcacaaaggtagaaaaaaactgtgacaagcctaaattataggcttaatattttttaagagagacaaatagacttctacatccggtcgatattcctcggtgccggacagtgcttatcggtgcctcgattagtgtaatatttaggcgcggatttcgtagattacacggttttaagaataaaaaaatccgtgtaattcgcgtaatctgcgcctaattttaaatctttatgtaaaacgagcctattatctttttattagactccttttcatttacttttagattcctgctagctccagtactttttcaacagctgccggtagtccgtcagtgtttttacctcctgcggttgcaaagtgaggctgaccaccgccaccgccttgaattagtttggcagcttctttcactaaattgccagctttcagaccactcgcaaccagattgtcgctaagcatgactgtcagcatcggttttccgttatctatatttccggcaacgaagaacaagttttctgtaatctcaccacgaagttggaaagcgatattcttcactacttctgccggtagcggagcacagaacttaaccactttgatgccgtgaatttcttgtatattcttcaacagtctttccttcagtgctgcttctttttctttcatgaagtcttccacctgcttcttcaatcctgcattttcatccagatatttgcggattgcaatacccaaatcaggagcattgttgaagagagccttcaagtcgctaagtgtatcttgtattgtatccagcatttcttccacgcgtgctccagtataagcttcaatacggcgaacgccggcagcaacagaactttcggagatgatttttaccataccgatatttccggttgcagctacgtgtgtaccaccgcagaactcgatagaagtgccgaactggatcacacgaactctgtcgccatacttttcaccaaaaagagcgatagcccccaactccttagcttcctcgataggaatattgcgatattctttcaatgggatattagcgcggattcttgtattgacgatatgttcaactttacggatttcttcatcggtcactttctggaagtgagagaagtcgaaacgtaatgaatccggtgtaaccaatgaacctttctgttcgatgtgttcacccaatacttcacgtaaagcagcatccagcaagtgggtcgccgagtgattagctgcgcaggcagcacgtttgtcggtatctacacaagccatcatcggagcttccggatgatcgggtaactttttggtaatatgtatcggaagattattctctttctttgtatcgaccacttcaatcgtttcgaactcgcttaccaatacaccggtatcaccgacctgaccaccactttctgcatagaatggagtatagtcgagtacaatctgatacaatgtctggttcttttgtttgatctgacggtaacgaaggatagaagcctcgtattcagtgtaatcgtaaccaacgaattcagtagtcccttctttcagtacaatccagtcacctgtttcgatggcggcggcattacgtgcacgctgtttctgttgctgcatttcttcattgaactcttcaatgttgacagtcattccgttttcacggagaatcagctctgtcaagtcgagcgggaaaccgaatgtatcatataaagtaaaggcatctttaccgctgatttcagtttttccattggctttggtatcttccattgtcttatccaatagacggataccagtttccaaagtgcggaggaatgattcttcttcttccttgattactttttcaatcagtgtcttttgtgcaaccagctcaggataagcttctcccatgttatcaatcaatacaggaagcaacttatacataaatgcctgtttctgtccgaggaaagtatatccgtaacgaacagcacggcgaaggatacggcggatcacataaccagctttcgcgttagaaggcaactgaccgtctgtgatagagaatgcaatagtacggatatggtcggcaattacacgcatggcgatgtcctgctgcttatcttttccgtattctgtacccgacatagctgcaatagctttcagcattggctggaatacgtctgtatcgtagttggatgtttttccttgtaaagccatacaaaggcgttcgaatcccataccggtgtcaataacctttgcaggaagcggctcaaggctgccatctgctttgcggttgtattgcatgaatacgagattccagatttcaattacctgcggatgatcgtggttcacgaggtcgcgaccggagatcttggcgcgttcttcagcaggacggaggtcgatatggatttcggaacaaggtccgcaaggtcctgtatcacccatttcccagaagttgtcgtgtttgttaccgttgatgatgtgatcctttggcaagaactgttcccaataagaagcagcttcgtcgtcacggctcaatccttcttcgggacttccttcaaatacggttgcatagagatgttccggattcagtttcaagacttctaccagatattcccacgcccagctgatcgcttctttcttgaagtaatcgccgaacgaccagttaccaagcatttcaaacatggtgtggtggtacgtatcgtgtcctacttcttccaggtcattatgctttccgcttacacgcaaacatttttgcgagtccgcgactctttggtatttcgccggatggttacccaaaataatatctttaaactggttcatacccgcgttcgtaaacatcagggtagggtcatctttaatcaccatcggagccgagggaacgatgtggtgtcctttcgactcaaagaaattcttgaatgaatctctgatctcttttgcagtcaacatataatgaagaattatgatttatgaattatgaattatgaattatgggctgtgggatatgagagaggggaagaatccccaataaatcataaatcacaactcataaattcgtaaaaactgtgcaaagatagcttgtttttattacttttgccgtattaacaagcgaaatatttccaaaaagatgcgcaaagtatactacatctataatccacagacccagacttatgatcgaatttaccctaccgtacggcagcgtgcgcttagtatcctgcgtcggcttttctatggaatggggttgggagcaggttgctttattgtattgcttttgatttttggttctccgtcggagaaggaattaagaattgaaaacagccgtcttttggcgcagtacaatgtgctttcccggcgtttggacgacgctatgggggtgcttcaggatattcagcaacgtgacgataatctgtatcgggtgattttacaggcagatcctgtttctccggctattcgccaggcaggttatggtgggacgaaccgttacgaagaactgatggatttggcgaatgccaagttggtggtgaacacgactcaaaagttggacgtgctttccaaaaggctttatatccagtcgaaatctttcgatgatgtgattgatatgtgtaagaaccatgatgagatgctgaaatgtattccggccatacagcctatttcgaataaggatcttcgtcagacagcatccggttatggtacacgtatcgatcctatttatggtacgacaaagttccatgcaggcatggacttctctgctcatccgggaacggatgtatatgctaccggaaacggaacagtggtgaaagtgggatgggaaaccggatatggtaataccattgagatagatcatggcttcgggtatctcactcggtatgctcacttgcagggatttaatacgaaagtcggaaagaaagtggtacgtggtgagattatcggaaaagtgggtagtacaggaaaaagtaccggtccgcatctgcattatgaagtgcacgtgaaagggcaggtagtgaatccggtcaattattatttcatggatttgagtgccgaagattatgaaaagatgattcagttggcagccaatcatggtaaagtattcgattaaaatcttaaaacaggagtgttatgcttaatacagacaaagaattgaagctatattattcaataggggaggttgccgacatgttcggagtcaatccgtcattgctccgtttttgggaaaaggaatttccgcaaatctctcctaagacagcgggaagaggaatacgtcagtaccgcaaagaagacgtagaaacgatcggtcttatctatcatttggtaaaagaaaagggcatgacacttcccggtgcccggcaacgtttgaaggataataaagaagctacggttcgtaattatgagattgtaaataagctgaaagcgataaaagaagagcttttggctattaaacgcgaattggatggacgggaataaataaatgctaatcgatcatggattcgataggcaagaaacctcataacaaaatgaacggtgaacaatttgcatgatactgcaacttattcaccgttcatcgttttcttatttaccgtttgaaagctattcttctacacggctcacctgtttgatattctgtattttcttcagattgttgcagatggtttttacatcatccacatcatgtacccataactgaatttttccttcaaagataccatcttcggtttcgatggttagcttacggatatttacattgagctgcctggagataacctgggtgacttcattcaaaagtcccatattgtctataccttttatatatatatataccaggaaagataattctttgtgtgtatcccattctgttgctaatatacggttgccataactgctcttcagtttggcggcaacagggcattggcgtttgtggataatgatccggtcgttttcatccacatatcccaatacatcatcaccgggaataggatggcaacattcggccatgatatatttcttctgcaaactttcttccgtcagtttgagcacctctttcgggttgattttttctttttcctgcggttctttctcttcctgcttctctttgctattgccgaaagagaaagtcagatatttcttccagttactggtttgcttttctttcagttcattcttgtccgcttctcccaaaacgattgctttactgccaatggcagccagcagttcttcctcattcttggcattatgcagtttgcgtagcttttcgataacagcttcttccggacggacttcctcctttttcagaaactcactaaggatttcttctcctatcttctggtttgctttacgctctttgcggagaatggctgctatcttggcgcgggcacgggcagtggttgcaaaaacttcccattgcggttgtacgcgttgcgattttgaagtaaggatttcaacttggtcaccactttgcaatttgtggctcaacggcactaatttatgattgactttggcgccaatacaatggctaccaatatccgtgtgcagggaaaatgcaaagtcgagagccgtagagttctgcggcatagtcttcagttcgcctttaggagtgaacacgaatatttcagaagcaaataaatttagcttaatggtatccagaaagtcaatggcatccggttgcggatcatctaatatctccttaatcgttcttaaccatttttccaattcaccttcatcctcgctgcctcctccttctttgtatttccagtgggctgcgaaaccttgttcggcaacgtcattcatccgttcactacgaatctggacttcaatccattgtccgttgttacccatcagagtgacgtgcaatgcctgataaccattagctttaggatggctaacccaatcgcgcaaacggtccgggtggggtttgtatatcttggagatagaaacgtagatatcgaaacagtcattgagctcttcttcttcattacgtggttcgaagatgattcgaacagccagtaaatcgtatatttcttcgaaaggaacatgtttggtctgcatcttgttccagatggaatagattgattttacacgggcaagtatccggtatttcaatcccatcttatccagttgggtacgaatcggggccgtgaagtcgttgaaaaccttgtcacgttcagcggcagtagcattcaacttctcctctatttccgcatattcttcgggatgttcatatttgaagcttagattctcaagctccgtttttatcttataaagccccaagcggttggcaagtggagcatagatgtaaagcgtttcgcctgcaatcttatattgcttgttaggtaacatggaaccaagggtacgcatgttgtgcaagcggtctgctatcttgataagaatgacccggatgtcgctcgacatggtgagcagcaacttcttgaagttctctgcctgtgccgaagcgcggtcaccgaagattccaccggatattttagtcagtccgtccacaatctgggcgatcttcggaccaaagatattctcgatgtcttccactgtgtaatcagtgtcctctaccacatcatgcagcaaggctgcacatatagaagtggaaccgagacctatttcattgcatacaatgctggcaacggcaattgggtgcataatataaggttcgcccgaacggcgtttgatacctttatgcgcctgattggcaaagttgaaagccttcgtaatgatttcaacttttttgcgatgcttagtattgagataatcattcagtagttcgtggaacgcctgattaatcatctcttcgtcagctatttctttgggggccagattatccataattgttatcctttcacttgcttagttctgcaaaaataagcaaatttccgaacgatgcaagcaggacgttatttatttgtatattttcaatcgttttcctgctgcaattttagtgctagacattccattccacctttgtatatccttaattgtgacaccatactttctggcaatagtggataaagtgtctccactttttattgtataataggtcagatttcccttaccggcaactgctgatgtcgttttgcgggttgcaggtgtaatatcctttacagcaacagttttccggttgcggaacaactcatcggcacgatgcgtataaatcgtatcttgcttatcgataaaagtactgatcgcgtcaataggcagtcttaacgtataaggtttgctgtcacccggaatcatttgcttcttatattgcggattcagactcttgatctgatccagaggtacattacaaaggtcagcgatttgttcgaagtgcagatttttgtttacttgcactgtgtcagtacttgccggaatattagtttccatcgggcagatattgtgatcgcagtagtaagtcatcacatagttggcagcgataaaggcaggcacatagccacgtgtttctttaggcagataattgtagattttccaataatcagtttcgccattggcacggcggattgccttattgattgtaccggggccacagttataagcagcaattaccaggttccagtctccatagatatcatacatttctttgaggtaacgtgcggcagcccaagtcgctttaatcgggtcacggcgttcatctaccaggctgtttgattccaaaccatagatcttacctgtaccaatcataaattgccacagaccggaagcacctgcacgtgatacggctgatgggttcaacgcagattcgataatcggcagatatcttagttccagtggaagtccgtatgcatccagtgcttcttcaaagatcggcatatagaagttgcaggcacttagcatgaaagaaacctgattgcgcaagcgtcctgcatacatatcgatgaatttgcggataatatcattataaggcatttccatgatggccgggatgcgtgacaagcggtcgatatagacagagtcactgaataaaggattgatttcagccgtactgcaatccttgcctaaatcaatataatttttagctttccagtcattcaatagactgtcaagtggataagtcatacttttaggcaggtcgatgctttctttgcgttcagttccattttcacgaatcactacatctacactttgcgcttttacctgcgacgtggccactagtaaaagaaaaataatcgaacaatagttaactaatttcttcatgcttcaataataagatcaatctaaattgtgttttttaaaatcgtaatacgcattgcagaccaaccgacttgtttttaaaactgttggagcggaactggttgttattatcaataacggccggctctactttcatactcaagtcgggggttatatcgaagttggataactccgcatctacataagcgtcgatgatagagatcaggtaaactccgataaatgcaaatatactaaggtcccgataacgacggaacatatcttttcttctttttagtgtgttttttagctgctcctcattataagtggagttcgggggcaacaaatcttcgtaacttttcgtattcggattgctgtccataatgtccagataggcttgcgaatagtctttgtacatcttaccgttccaacttaaggcgtaagcacaaccagcaaatcctccatatataataggtaatttccagtatttacggttgtaaatctgtcctccaccggggaatacgactgccagccacgttgctttggtcggattcgggataaatattttcttgttaatatcttgagcaggtggcggcacagtgtcggtctttacaacaatggaggcaggttgctctatctttttcagctctttcttgttggctgcatccaagctatccgctatctgtattttagcagctgacaaactgtcgatggccggaagttctttggatggtatgatttggatagaatccttcttcaccgagtcctgtattatcggatcacgatgccttcgtgcacgggctttcggcgcttcgcgctgtatgattgttgtatctttccgtgccggagtaacagtggattgtgcatacacatcaatccctgccacctgtaaaaaacagagaagcagggcgctgactagtaactgatatttcttacttttttttgtcatttacttctttagcgtatcgaagatttccatgatacgttccagttcctcctcgttcccgaaaggaatactgatcttgccttttcccttttcagagcaggtgagttgtaccttggtgttgaaaaagccggagagttgttgcttcaataagttgaattcttcaggaagtttgccacgtttgggtgttattttccgtgtgccgcttttcacagcttctccttcgcttaatgatttaacaatttcttctactttgcggactgaatatccgtgttcttgtatttcttcgaatattttaacttgtagtttagggtcgcctaatgaaatcagcgcacgggcatgtcccatgtccagctgcttgttttgcagggccatctgtattggagccggcaatttcagtaagcgcaggtagttggcgatcgtcgttcgtttctttccgatacgttcgctaagacgttcctgtgtcagttcgtactgatcgagcagatgctggtaggcaagtgcgatttctacggcattcaggtcttcacgctggatattttcaatcagcgccatttccatcatgttttcgtcgtcggcagtgcgtatataagcagggattgttttcagtcctgctctttgtgatgcacgataacgacgctctcccgcgatgatctgatactcatcgtccgagagtttgcgtaaagtgataggttggatgataccgatttccgcaatggaatcagccagttcctgcaatgctgtttcgtcaaactcacggcggggctggttgggattgacagtaatctttgccagctctatttcattaatggaagaagacccttcggttttcacatcatccattgagagcaaggcgtcgagaccacgtcctaatgcatttcttttttgtgttgccatatcttcttctttcttttatttatttcggttgataatctctttagcaagggccaggtgatttttggcgccggtagattccgcatcgtaaaggatggtcgggacaccgtaactgggagcctcgctcaatttcacatttcgttgaataacggtgttgaataccagttcctggaaatgacgtttcacttcatcgtaaatctgattagcctgacgcagacgagagtcatacattgtcagtaagaaaccttcgatttctaaagccggattcagtttcgacttgatgattttgatggtattcaacaatttgctaataccttcaagagcaaaatattcagcttgaacggggataatcacggagtcggctgccgttagggcgttgatcgtgattagtcctaatgaaggagaacagtctatcagaatatagtcatattctttcttcaaaggcgtgagtacttcttttagtatcttttctcggtttgggaggttcagcatttcaatctctgctcctacgagattgatgtgcgaagagattactttcaaagaatcaatctccgtatcaaggatagcgtcctgtacgttggctctgtcaataatacattcatagatagtgcattccgactgcttgatgtctactcccaagccggaagaggcattagcttgcgggtcggcatctactacgagtacctttttttccagtgtagcaagtgaagctgcgagattaatcgtagtcgttgtctttcctacaccgcctttttgattggccaaagcaataatttttcccatattctctaaatttattggcagcgaaataagtgataaatccttagagcgcctacgaaaaaagagaaactttgcaatttctgttgataagtcgcctgttttgttaataactgtcggacgaaacggttacaaaacttcaacaggttcatcatcttcttttctctttaacgagcttgcaaatatacatatttatattggatatctatttctttttttgctcgcttgcagaagattaagatttgtaaacgggtaggagtggggcggaaagagacttttcgatctgatgtagggaggtgtttggcggtacggcttctttttgttacttttgtgcgaatataaaaaaggaaaggattgaagatatggaaaatgaaaagccgttgatacttgtttcaaatgacgatggcgtgatggctaaagggattaatgaactggtgaagtttcttcgccctttgggagatattgtggtaatggcacctgatgctccgcgctcgggcagtggttgtgcgctgacggtgacgcagcctgttcattaccagttagtaaagaaagaagtaggtttaactgtttataaatgttcgggaacaccgaccgattgtatcaaattggcacggaacacagtgctcgaccggacaccggacttggtagtcggcggtatcaatcatggagacaactctgccactaacgtgcattattccggcacaatgggagtggtattcgaaggctgtttgaatggaatcccttctataggcttctctttgtgcaatcatgcacccgatgccgattttgaagctaccggaccttatattcgcagtattgccgccatggtactggaaaaaggacttcctcctttaacctgtctgaacgtaaacttcccggatacgaccgatatcaaaggaatcaaaatctgtgaacaggcaaaaggtcgttggacgaacgaatgggctgcctgtccccgtctgaacgatccgaattatttctggttgaccggtgaatttaccgatcacgaacttgaaaatgagaggaacgatcattgggctttggcaaatggctatgttgctatcactccgaccacggttgatgtgacagcttatcactttatggatgaacttaacaaatggtttagttaactatcaactatcatgaagtattatctgattgtcggcgaagcttccggcgacttgcacgcttctcatctgatggctgccttaaaggcagaagatccgcaggctgatttccggtttttcggaggtgatttgatggctgccgtcggaggaacgatggtgaagcattataaagaactggcatacatgggttttattcccgtgttgctccatctgcgcactatctttgcaaatatgaagcgttgtaaaggagatattgtttcctggcaaccggatgttgttattctggtggactatccgggattcaatctggatatagccaagtttgttcatgcaaagacacagattccggtttattattatatttctccgaagatatgggcgtggaaggagtatcgtatcaagaatataaaacgagatgtagacgaacttttctccattcttccttttgaagtagagttcttcgaaggaaagcatcaataccccatccactatgttggtaatcctaccgtggatgaggtggtggcttatcagaaagctcatccgaaaaataaggatcagtttattgcggagaatcaactggaagataaaccggtaatagctcttcttgcaggtagccggaaacaggaaatcaaagataatttgccggatatgttgaaggctgcttctgctttttccgattatcagcttgttctggcgggtgctcctgccattgctcccgactattataaaaaatatgtaggagaagcgaaagtgaaaatcattttcgatcaaacctatcgtttgttgcaacacgcagatgtggctttggtcacttcaggcacggctactcttgaaacggcattgttccgtgttccccaagtcgtttgttattacactccgatagggaaagtggtttccttcttgcggcgtcatatcttgaccgtgaaatttatttcgttagttaatctgattgccgaccgtgaagtggtaaaagagttggtggcggatacgatgaccgtgaagaatatgcaaaatgaattgaaaaatatcattgaaaatgaagcatatagaaatgaaatgcttttgggatatgaatatgtggcggaacggttgggacctgccggtgctccccgtcatgcagctcgtgaaatgctgcgcttgttgaaaaaataactttctttttctgaataaacgtaaagccgatgcagtaattgcacggcttttttatttattaagcagaagactaaaaaaagaaaggaaaaagatatgaaaaaaattaagtggcttttaggaatgttgttattggcattagtgccaatgttgcaatcatgtgatgatgatggttattctatcggagatttcagctgggactgggcgaccgttcgggcaaccggtggaggaggttactatttggaaggtgatcgttggggattgattgatccggttgctacttccataccttggtttaaaccggtggacggtgaacgtgtggtggcctttttcaatcctttgtatgacatggaaggaggaaaaggagttcaggtaaagatggaaggtgtacaggaattgttgacaaaggaagtggaagatatgaccacagaggaagaagcggtggaattcggcaatgatcctatcctgatttatcagggtgacatgtggttgggaggaaaattcctgaatgttattttccgtcaggagctgcctcgctcggagaaacatcgtatcagccttgtgcaaaataagatagaaacgggagaaccatcagaaccgggaacattgaatgtagctgaagatggttacgtacatttggaactgcgttataatacgtatgaggatgtgactgactattggggatggggacgagtttcttataatctggaaaagttcttcccaacggaaaaagatgccgaatcaacaatgaaaggttttaaagtgactataaattcaagagaacatggagaaggaagagtgatcgttcttgatctggaacatccggtaggtgtgccggaagctgcgaaggatgtacactccacttcttcgatccgataacctaactatgatttactgtgtgtgaaacgaggttgtgtcaaaacgttggcacaacctcttttatattttacagttctgctatattttcttttggctatgctgctttttcctcatgcatttggcaacaagttgctatattccaattatatcgggttataaatagtcccataaacatatatttggcaactgtaatgagcccctttccttcttttatcagtttagcacacatttttttgatattaaaggctatagcaaagaaagcaaagtccattgtaaccttgtcttctcccacatgccggaatcttctgtatgccatgttgtatttcatttgtccaaacacagcctctggttctatacacctcctgcctctatgcttgataccttcttctgagagcaacctttcccgtgcctgccgtttgtattgatttaatcggtggttgacttctataatacggttcccccgagctttaaaacaactgccacgcaaagggcaaccttcgcatctttttgctttataccgggcactttcgatgatgtatccgctcgctgtcttgtcacgtttggttcctatacggttcatgtgctgtcccataggacaaacgtaataatcctcttgggcattgtaatggagactttcggcatggaatgggttgggagtataacgaggacgctgttctttatggaagtaattgtacttgatgaaggcttctatcccattctcctgcatgaaccggtaattttcttccgaaccgtaaccggagtctgccacacagatattcggtaaacggttatagcggtactggaaagagtggaaaaaaggtatgagggtcagtgtatcggtagggttgggaaacagacggaagtctgtgatgaattggttttcagtacctatttgcagattatatccgggtttggtctgcccgttcttcatggcatcttctttcatgcgcatgaatgtggcaccaggatcggtcttggaataggagttacgttctccaagggtatcaaggtgattgtcgtattctatcagcttgtcacgatacccttcaagttccatgacctgcttcttctttttgcgcagggctttcttttcttccttatcctttgttgcaggctggcgttccagggcttctttaagttcatccactatgtcagagagcctgcagggagtaaactccacggatgtgtcttttatagagttctcctgtgcaatggcttcatccacctgttccaagagaatacggattttatccattagtctcgtacggttccgttcgactgtcttgcgccagacaaaagtatatttgttggctttggattcaatcttggtgccgtcgatatactccacatcaaggctgatgaaacctttatcggcaaggacaagaaccaactgggtaaatacattatttatttcctcctttacacggttacgaaaacggttgatcgtgataaaatccggatgctcattaccggcaagccaaatataatgaatgtcacgaaggaggtgcttctctattttacggcaagaatagatattattcatgtaggcgtagattatcaccttaagcatcattttaggatgataaggacaacggcccgtttccttataaagcttcttgaaactctcaagattgagattgtcaataacagcattcacgatgcggaccgggtcggtcgcagctatgttttcatcaattctttgtggaaaaagaacggtttggttgggaatgtaaggacgaaaatgtaactttgccataacgaaaaactttatacctaaagatacgaaaactttgggtaataacaaagcccgggcttgagaaagtctgggctttgcgcataaaaaaaggctgtgtcagcgttttgacacaacctctttgtattgtgtgcaattctaatcgatgagaaaaactcctgttagaaccatgttaatgcatataagtaaacgactgctgccggtatggccatcaaagaactgtcaaaccgatcgagcatccctccatgtcccggaagaatatttcccgaatcctttacgtgcaattggcgttttagcaatgactccgtcaggtcgccccatgtaccgaatataaccacagctaatgccagtcctgcccattccatcattgacataaatgggaagtagtgagcaagtataaaagacactccgattgctacaactccgccgccgatagaaccttcccatgatttcttgggagagatgcgttcaaagagtcggtgtttgcctatcagtgacccgatgcaataagcacccgtatcattcagccaaaggaaaataaagatggataacggtagaatcggattatagcttatgctactgaattccgatgccggatcattatggaaagccaatacattcagcaaagcaaaaggcagaccgatataaagttggctaagcatcgaataagcccagttaagtaccgggttctcctttttcagatacaactcgctaatcatcatgtaaagcaataaaagcacatacgggatgaatattttcgaatcggctgcatcaatgcagaatcccatgattgcgaggaataaataagccccgccgagcatattaatggtcttgtttatcttgactccttctgcgcgcatatttaccaactgtgcaaactcataaatagtcagtgcactgataacggtaaacagaatgccaaaactgaatgcgtcataaaggatgcaccctaccaagatggcaacgaagagtacacccgtaatagctcgttttatgaaattgttaatcaaaatctattcgttttaattatttggacccgttagcttgttcttctccattggacttaccctctacggtaactttgccttccactgtaaccttgttacctgctgcggcaactttggtgtcaatggaagcttgctcctctgcagtattttcagcttcttcttctttgatttctttttcttcttcttttaacttttgggcaagttccctttcagctcttgcggcatcctggctttctttagcagccatgatttcttccgaacgcgaagcccaggggcgtttgccgaagatacgttcaacgtcttccgcaaagattacctctttgtcaatcagtaattgcgtcagttcgttgtgaccttctttgtgctctgacagaattctcttggcgcggtcatactgctcgttcaccattctcttgacttcttcgtcaattagttcggctgtcttttcgctgtatggacggttgaaagaatattcatcgttgttgtaataacataaattcggcagcttgtcgctcatacctaaataagcaatcataccgtatgcctgtttagtcactctttccaagtcgttcatggcaccagttgaaatgcggccgaggaataaatcttcagcggcgcgtcctcctaaagtagcacacatttcatccaacatttgctccttagtagtaatctgacgttcttccggcagataccaggcagctcctaatgcacgtccgcggggaacgatagttaccttaatcaacggattggcatattccaataaccaggagatagaggcgtgtcctgcttcatgcaaagcgatggaacgtctttcagcttccgtagtaatcttggttttcttttccagaccaccgatgatgcggtctaccgcatccagaaagtcttgcttgcctacaaatttctttccgtggcgggcagcgatcaatgcagcttcattgcagacattggcgatatccgcacccgagaatcccggagtttggcgagccagcaagtctacatcaacactatcgtctattttgatcgggcgcaaatgcacaccaaatacttctttacgttcattcaagtcgggcagatccacatgtatctgacggtcaaaacgtcctgcacggagcaatgctttatcaagtacgtctacacggttagtagcagcaaggataattacaccgctgttggaaccgaaaccgtccatctctgtcaataactggttcaatgtgttttcgcgttcgtcatttcctcccattgcaggatttttgccacgagcacgtcctacggcatcaatctcatcaataaagacgatacaaggggctttctctttggcctgtttaaacaagtcgcgaacacgggatgcacctacacccacaaacatttccacgaagtcagaacctgccagtgagaagaaaggaacattagcttcacccgccacagctttggcaagcaaagttttaccggttcccggagggcctaccagcaatgctcctttgggtatcttacctcccaaatccgtatatttctgcggttccttcaagaactctacaatttcctctacctcttgtttcgcttctgccaaacccgctacatccttaaatgtaatcttgatggctccacctttttcaaaaagctgggcttttgattttcctacgttaaatacaccgccggggccaccactgccacctccgctcatacggcgcatgaagaagatccataacgctacaagcaagacaagcgggagtatctggatcaggattgcgggaaaaatatccgatttgggcggatagtcggaagaaccgtcaaaatgaccggcttccttttctgcctgcaaaaactcttccagtttatcggtagatggcgttctacttgtaatgatagggttacgtcccactttggtagagtccgctccaaaaacagcccctacagcagtcggtttaagaaaagcttctattgacttatcttcataacccaatactttgcttacatagcccttttttacgtagtcctgaaactcactgtaagttacagctttgcttccagctccctttgaatcactgccccaccagaggccgagaagcataagggcaataatcatatacatccagttcaggttgaacttaggcatattaaccttattgttaggtttattgctattgttattattgctattattattgtccataatcattaattagtctagatcggggatttgagtaagtttggcatctgcccaaaggtgttcaagattataaaaatctcttgtctccggtaaaaagacgtgtaccagtacatcggcatagtccattgccacccattcagcattccggagtccatcgattgcataaggtttgctatccgcacctttgcgtgtaaattccttgattgaatctacaatagcactcacttgactgggagaatttccctgacagataacgaaatatttacagatggtatcttctatgctggttaaatcggcaacgattatctttttaccttttttctcttgaattccttcttttattttttcaattaatactttagtatcgttcattcctgtaattgagattaataattcatgttctctatttgtttataacaaaaaaaggcaagcctttgtttctgattataaacgtgatatttttgacaaatatacgctgatttattggatacaagaaagttatccctcaatttttgtgttttttagtggagatacttttgtttagaaagcttatttggacatttttgcaaaaaaaatatcagaattgttttgaattcccaaaatatttgtatctttgcacccgcaaacggaaattattgggctatggtgtaatggtaacactacagattctggtcctgtcattcctggttcgaatccaggtagcccaacaaaacaccagctttttactgacaaaaacccgctaaaaatgcaattttagcgggtttttttgtgctttgacaaataccatccgaaaaaagttgacgctaattcggtggctaattcggtgacacgaatgcacgttgatagttcgaaaaacgctaatcttatgaaaagccgtgcggttgattgataaagaataaatccttaaactggctgtcgtcttgtttagtagaaaagaaaaacaggttttatagctcaagtgagtataaaacctgtttctaatttttctaaatcgggcagaactcttattcttctgcttttattgattcatcgattactttgatcttttgtaataccagttccaagtctgctttcaacttatctaccttgcggttcaattcagtcagcaggctgctgcctttcttagaagtagaagtcaggaagcctagattgttctcataagtctgaagctcattcttcatattctcataagtacgtaccagcttttcgcgttctctgtacagagattgagtgccgcttccctgaatattgctgatattcgaacggaagctacttaacttcttgttggaagcattgatgttaaagcggtcgaatagctgatcgatgattccgtgatactgcttgtataacttatctttttctttgaacggcacatgaccgatagagttccactctttcattaaatcccgaaccaaggtacttgcttcttcggtatccatgctttcatcaatagcggataacttctcgatcaacgctttcttcttttccatattctctgtttctacggagcgttgtgaagaagtagctttgttcttttgttcgaagaaatagtcgcaagctgtgataaaccgtttccagatagcatccgagtgtttcttggcaaccggtccgatggtcttccattctttttgaagtttggtcagtgcatcggcagttactttccagtctgtactgtctttcaaggcttccgctttttcgcagagcgctttcttcttttccagattctcgttcattccttctttcagacttttgaagaattctcctttcttcttgaagaaatcatcgcaggcatggcggaaacgctcgaagatcttcacattcatcttttggggcgcaaaaccaatggttttccatttgttttgcagggcaatcacttcctgggtcttgttttcccaggcagagaatgttttcagttcatcatactcaatcgcttcaacgatttcgcagatgacggtcttttgatccaaattatgctgttcggcttctttcagcgattcaaagtgctgctgatggcggcggttgacagcggtagaagctgctttgaaccgattccagatttcatcacgcagttctttggctaccggacctgtatcgcggaactcctgatgcaacttctgaagttggtggaaagcggaaacaacatcttcctcgtcagccaacttttcggcagcttcgcagagatgcgttttgatttccagattctttttgaagtcatattcgcggaattcattgttcagtttcaataaatcgtagaacttctctacatataattgatagtttttccaaagttcattcactttaccttgcggcaccagttttgtgtcattccattgctgttgcagcttcttgaactccgtataagatttgttggcgtcatctccggattccaccaattctttcagttcttcaataatggaaagtttcacttgcaggttttcttccttttggcgttccagctcggcaacctgtttgctgcgtttttccttgataacccccatcaggcgtttgaattcttcttccgtcgggtcctcttcggcaacaaaatcttcaatgtttccaccgttgtctgtaaactgtaccttagcagcttccaactcggcattatgtaacttgtagaatgattgtttcagattgtcaatttcctgcttgttcgcattttcagcgtcttgcgcaagctcttttagctggtttagtacatcttccttagtggcaggtttaggagctgcttcaggttgaacttcggcagtaacatcttcagccggagtctctgtaatagcttcagaaacctcgactgttttcttttcttcttctaattccccttggttcaagggttgattagtgtcatgagcgtccatcattgtatattagttttgggtcacaaattaatgaaataaaacgattacttcatactattttgcttatttttttttgtttatcgtgtttttatgacaataaaacggttattcccatgtacaacatcattccgatgatgtcatttgtaatggctataaacggacctgttgcaatggctggatcgattttgaacttctccagcgtcatcggtaccagtgtcccgaaaatagaagcgaacattaccacggcaaacaggctgatggatacggaataggtgaccgtagccgttgcgccgaacctgataaagttgtaggtgtatactaataaggagataatagtggcattaattaaagctactaccgattccttggtaatctgcttgaaggtatttttagcgtccagcgagctgtttgccaaaccctgtacgatgattgccgaagattgtgttccgacatttcctcctgtaccaccgattagcgggatgtacagtgccatttcgggatgggcagcaaaggtggagtcgaaattacccaatatcatagagttgccgattccgccgatcataccgattaatagccaggggaggcgggcggtggtctgtctcaatacattatcgtctgtttctacgtcctgcgaaagaccggatgccaactgatagtcacgttccgactgctcacggacttcatccatgacgtcgtcgacggtgatttgtcccacaagccgaccgatactgtcgacaacagggatagccaccaagtcatacttctcaatcgcctgtactacctcgtcaatgggagtatctacgtgtaccgaaatcggatctttctgcatcacgtgtttcactttcgatacagaaggggaagtaatcatctttttgagcgggaagatacctcgcagacgttcgtcatcgtcgatgacatatacataatagatttcgtccagctcttccgcctgttgacgcatctctttcagacattcgggcatactccagttctcgttgacgagtaccatttccgtacccatcaaaccaccggcggtattttcgtcgtatttcaacaagtcgacaatgtcacctgcctgttcaatgtcctcgatgtgcgaaagaacctcttcctgcttatcttcatcgagttcacgcatcaggtctacggcatcgtccgtatccatgtagtcaacgaagcgtttggcgattgtctccgaaggaagcatttcgagcagttctttacgagcgtcttcgtccatttcgacaagcacgtcggcggcaatttcattatcgagcaggcgatagatgaatttagcctcttccggattcaggtcattgcacaattcggcaatgtcggccggatggaggtcgatgagaagcccttttaccgtatcggcatctttttgctcaataaggtgtttaacgttgtcaatgtattcctcgttcatcgttgtcaattacaaattacgaattacaaaatccagttctctgcttactgctgcccgtagatcggttataggttgttgcctgccgtctttaatgcttcttccactttattggtcaggtcgataaattctgctaccgatagttgttccggacgtttattaaataagatgttctccgtgagtggacaatctttgcctaaaataggtttaatagagttgcgcaatgttttgcgtcgttggttgaaagtcgttttcactacctgtttgaacagtttctcgtcacatcccaattctttagtttcgttgcgcgtcatgcggataacagcacttttcactttgggaggcggattaaacacgtgctcactcactgtgaataggtattccactttataccatgcctgaatcaatacgctaaggataccgtaagtcttgctgcccggtccggctgcaatacgttcggctacctctttttgaatcattcccgtacagcaggggacgatatctttgttgtctagcatcttgaaaaagatctggctggagatgttatacggataattaccggtcagtacgaaaggtgtgccgtcgaatagccggtgaaggttcattttcagaaagtcatcttcgatgatgtggtcctccaacgacggataagcttcgcgaagataggcaaccgactcatagtcaacttctacgacctttatcaaccggtcttttttcaccaaaaactgggtcaatactcccatgcccggtcccacctccaaaataggcagttcagggaaggtgtcgacagtatcggcaatatcttgcgcaactttcagatctttcagaaagtgttgtccgagaaactttttaggctttactaatttcatttaccaactaaataattacttttgcagtcgacaaaggtaattcttttaaatgaagaacgtaccactatttattaaaaaataaatgatgtgtcagcgaagctaatgaagaattaaggatgaagaaactattaaaaaagacgctgaaactgatattaccggttgttttaggcggctttatcttattctgggtgtatcgcgactttgattttacaaaagcgggcgatgtattattacacggtacaaattggtggtggatgctcttctcattagtgttcggggtgttcgcgcaagtctttcgtggatggcggtggaggcagacactggaaccgttggacgctttcccgaaaaagagcgattgcgtgaatgctatcttcatttcttatgccgccagtctggtagttccccggatcggggaagtgagccgctgcggggtcttggcgaaatatgataacgtctcgtttgccaagtcgttgggaacagtcgttacggagcgattggtcgatacattgacgattcttctcatcacaggcatcacagtcttgcttcaattaccgatattcgttacctttcttcaacagaccggaacaaaaatcccttctcttgttcatctcctgacttcggtatggttttatatcatcctgttttgttttatcggtgtggcgatccttctttattatttaagaaaaacgctgttcttctatgaacgggtgaaaggctttgtacttaatatatgggaggggattatgtctttaaagggagtacgcaacattcctctctttattttttatacactggccatttgggcgtgttattttctccatttctatttcacattctattgcttcgcctttacggcacatttaggaattctggcagcattggtcatgtttgtaggtggtacgtttgccgtgattgtgcctactcccaacggggcgggaccgtggcatttcgctatcatttctatgatgatgctttatggggtaaatgtgacggatgccggaatctttgccctgattgtgcatggtattcaaacctttctggttgttctgttgggtatctatggttttgctgtcctgtcgttcactaacagacatcgagggtgaaattttagctaaaagtgtgtattcttaaatgtttttgctgacgtcctttgtcatctgaaaacttttccataacttggcactgtttaattattagatttaaaatcgttttaaaatatttattatgagtaccattctttctttagctccacaaaacgtgtggaagcatttttattcgttgacacagattcctcgtccgtcaggacacatggaaaaaataacagaatttcttctaggtttcggaaaaggtttgggtctggagtcttttgtagacgaagcaggtaatgtaattatccgtaaaccggcgactccgggtatggaaaaccggaaaggtgtaattcttcaggcgcacatggatatggttccgcagaagaacaacgatactgtacacgattttgaaaaagatccgattgaaacttatatagacggtgactgggtaaaggcaaaaggtactactttgggtgcggacaacggactgggagtagccgccatcatggccgtgctggaagcaaaagacctgaaacacggccctctggaagctcttgtcactaaagacgaagaaaccggcatgtacggtgcatttggcttgaagccgggtaccctgaacggtgaaatccttttgaatctggattccgaagatgaaggtgaattgtatatcggttgtgccggaggtatggacgtaactgctaccctggaatataaggaagtagctcccgaagcaggagatatcgcagtgaaagttactttgaaaggattacgcggcggacattcgggattggaaatcaatgaaggacgtgccaatgccaataagttgctggttcgtttcgttcgtgaagcggttgccagctatgaagcccgtttggctagctgggaaggtggtaatatgcgtaatgctatcccgcgtgaagcacatgcggttattaccattccggctgaaaatgaagaagaactgctgggcttggtgaaatactgcgaaaacctgttcaacgaagaatattcagctattgaaactccgatcagttttacggctgaacgtgtagaacttcctgccggtgaagtacctgaagaaattcaggacaatctgattgatgcaatctttgcttgtcagaacggtgtgacacgtatgatccctactgttccagatacggtagaaacttcttccaaccttgctattataacgattggtgaaggaaaggcagccattaagattctggctcgcagttcaagcgatagcatgaaagaatatctgactaccagcctggagtcttgtttctctatggcagggatgaaggtagagatggcaggcggatattccggttggcaacctgatgtaaattctccgattttgcatgcgatgaagtcatcctataaacaacagtttggtgtagaacctgcagtgaaagtgattcacgctggcttggaatgtggtattatcggtgctattattccgggattggacatgatttcttttggtccgactttgcgttcaccgcattcaccggacgaaagagcgttgattcctaccgtacagaagttctatgacttcctggtggcaactttggagcaaactccaatgaaataacgtatttctctttatataaatattctcctattatataataggtgaccatagtgaaggcacggatgatatttcatctgtgccttttttcatatttattgcagcgtatattacaattctgctttataacaaataaattaattgatgcaaatcaagaaatatgctataaaacataaatttctctcttttttagatcaatgtataaacaaaggctgtatttttgtgttgtaaaacatgtaattaggaggataacaaaatgaaaagtttaaaaagattgtttagaaagatcggcgaagccgatgtacatgtttggggatattcaacaattaataccaaaccaaacaagtaagttttattttttagttttcaggaattagtaatttaaaaggtttaaagattatggcaaagaaaatgggttctttagttagaaaaatccttagtgaagtaggtcgtaatgaaatgctttcatgggggtacagaattgagaaatgagaacaagtacattaactaagtttagagtggggatacgttattaaatacgatatccccattttttatatctaaaattttatatagagttgttttagctaacaactgtggcgggggatctgtttcagtgtcagttcctcctttaatttctgtgtttgggtacactgtcttttgccacttgggctggaatgtatcacatgcgagtttggctgattttactatcacaccctcaccgaatcacttgaaagcctttgttcatcgatgttacaaagggtgagggtaactgtgattgtagggtgagggtaatttttactctcaccctacaattatacctgtaataagtgcttaatagttgatttatagtaagttgtatgctgatttgtctggtactaatacatgaaagatgatgtatttgtgtctgataactggcgtaatattatctggaataacaggctgaacgagataatagatacggatgaattaattgtattccgtaaggtttcgattggcttctccataggggaaaatcagtttcaagcttgtgaacagtttgtttcatacgcttgaaacacttagtttcaaggtattaaacacttagttttccggtgtgaaactggtagtttcattacttgaaactgttggtctcaaggcataaaacagcttgttcaccggcatgaacaagccattttatgtagaggtgctgcaaattattgagtgtcttctatgaatatgcccggattcttataaacgagacagtgtgtaagatacctctatcttgcacgcatctgcaacggtatcttgcactgcttcaaatacttgtatatcagttgactatcgctggtttagtgtaaggtgcaagatacttttgcatttatgaacttgtaagagataggtgaatcttattgcagaagataaacttttcaattaaataataaaccgagtggcagtttttggactttttattttattccagagcgagttgattaataggctaatgtttatacaatatggtatggggctgatagcttgataaaagctttttttaagctaaaaagtacaaatctttaaactttatttccttactttgttatttataagagtgagacttatagcaaacttaaactagaaagattatgaaagtaaagcaaatttgtatgatggtgctgctatggttgggagtgattccggcggtacaggcacaaactttcgacaaattatggaaagaagtggagcaagcggagaaaaagagcttgcctaagactgtgataaaactgactgatgagatttatcagaaaggggaaaaagagaaaaactctccacaaatgctcaaagcatatacgtggcggatgaaatatcgggaaatgttgaatcccgacagtctttacgctgatttgaaaggactggaacaatgggtgaaacagactgaccaaccaatggatcgcgccatcctacactctttgatagcgggaatctatgcagattatgcagccagcaatcagtggcaactccgccaacggacagaaatcgtagaccagacacctgctaccgatatgcgtgaatggacagccaatatgttcatcgaaaaagtgcggacaaatataaaggaggcattggccgattctgtattgctgctcaaaacgtcctcacgcggctatattccttttgtagaactgggggaaacgagcgaatactatcaccatgatatgtatcatttattggcttcccgtagcattgaagcactgcaacgggtggaagaattgagtaacaggattactaatgacggtactgtgaatccggtcaaacaagatataatagctatttatgggaatatgattcccgcttataaagcaaccggattaaaagaaggttatgtgttgacagcacttaactacctggaatggagatggaatgctgatcggaatattcgacctctgcaggctaagggcgaacttccggtactgacggaagatacttatctgaaagctttgaacacattgaaaagcaagtatgcttccgaaccgatctgtgccgaagtctatttggcagaagcccggtatactattggaaaacaacagcagctcaatgcattgcagctttgcgatgaggcaatccgcctttatccaggctatcgcagaatcaatgctttgaagaatcttcgggaagagatattggctccttatttgaatgttaatgcatccgatttggcttttccgaacgaagagatagaattaagggtctcacacaaaaatctggatggtttcactgtccgtctttatcaggcgaagaaactgataaaggaacaacattacgctgtgcttcgtccgaaagattatcagacgcaggacactgtgtttacattcaaagctcctgaacttggatcttacgtgatgcgtatcataccggatattcgtgcgaagagagatagtgaaagcaagtttgatgtaacacgtttcaaagtgctgacatgccgtttgccggacaaacagtatcaagtggtgacgctggatggacagacagggtatcctattccccatgcgaaagtgacgatgtacagtaatgacgaaaaagtgttgcaggagtttacgacaaacgaagagggtaaggtcgtatttccctggaaatccgaataccgctatctgaaagcttccaaggggacggatacggcaatgccgaaacaaggcatttatgcaggaagttacggatattacggcgacgaagataaagtgactgaaaatatgactttattgaccgaccgttctttgtatcgtcccggacagactgtgtatgtgaagggaattgcttattctcaacaatcggatacggcgaatgtacttccgaacaaggaatatacggtgactttattggatgtaaacaatcaggaagtagggcagaagtcggtacgtaccaatgagttcggttcgtttaccaccgatttcgcattgccttcggcctgtttgaacggaatgttttctttgaaagcgggaagagaccatacaggcattcgggtagaagattataaacgtccgacatttgatatcacttttgaaaagcaacaaggaagttacaaactgggtgatgaggtacaggtgaagggtaaggtacaatcttatagtggtgtgctgcttcaggatcttccggtgaaatatacggtaaagcgttctgcatatagcctttggcggtttgcggaatctgtgcagattgcttccggtgaagtgatggccaatgagaatggagaattcacgataccggttcgtttgcaggaaagtgactcttataagaataatgataaggtatattatcgttattccattgaggccactgttaccaatgtggcaggtgaaacacaatcttctacggacgtgatttcggcaggaaaccgttcgttgattttgcaggtggaattgcaagataagacttgcaaggatcaacccttcgaaacaatgtttaaagtgcagaacctgaatggacaacctgtggaggtgaaggggaattattacttgtaccctgccaaagacaaggactttaagcagttggaagagaaaccggttgcaacgggaacctttacttctaatgaagacatgacgcttgactggaagaatcttccatcgggaccttatgtgctgaaagcatcagtgaaagataatcagggcaaggaagtgactgctgacaccaacacgattcttttctctgttgaggacaaacgtccgcctgtagaaacgacgatgtggttctatggtgcaaatacggaatttgatgctgcccatccggccgtgttctgtttcggtacgtcgaaaaaagatgcttatgtgatgatgaatgtattttccggtgataaattgctggagagcaagacgttgaatttgtcagatacgattgtacgtttcgagtatccatatcgggaaagttatggggatggtgtctttgtgaatctctgtatggtgagggacggacaggtttatcaggaacaggtgcggctgaccaaacggattcctgataagacactgactatgaagtgggaagtgttccgtgataaattgcgtccgggacaaaaggaagaatggaagctgacgattaaaacgccgcaaggacaagctgctaacgcggaaatgctggcaacgatgtatgatgcttccttggataaaatatggaatcggcaacagaatttccaaatctattataaccagattgtcccatattctaactggatgagtggatattccggcaataattcattcaactactggtggaatacgaagagtctcaaagtgccatcactggagtatgaccattttgtgatgctatcggactattataataatggaagagatttgggtgaagtaatagtgagaggatatggcttgacgagaaagttgacggtgacaggtagcgtttcgacattggacgttgcaactttaaggagtaatgcgccaaagatgaaatcggctatggctgctgatgccatgactaatgttgaatttcaatcggaaatgatacccacgggagaaaaagcggatgaggcatctgacaacgaaatgcttcccgaagcatctgctgacttgcgtaccaatttagcagaaacagcattcttctatcctcaacttcgcaccaatgaacagggagagatctctttctcattcacgatgcctgaaagtctgacgcgttggaacttccgtggatattctcatacaaagggaatgttgacgggaacattggatggcgaagctaccacaagcaaagaatttatgctgactcctaatctccctcgttttgtgcgtgtgggtgataagacttctctggcagcttctatctctaatatgactggtaagccgcaagccggaacggtcagtctggtcctttttgacccgatgacagagaaggttatcagtacacaaaaacagaaattcagccttgctgccggaaagacaatgggtgtggacttccagtttatcgttagtgataaatacgaaatagtgggatgccggatgattgccgacagtggtactttcagcgatggagaacaacagttgcttccggttcttagcaataaagagcatttggtggagacacttccaatgccagtgcgtggagaagaaacccgtactttctcactcgatcatctgttcaatcaacaaagtaaaacagccacagatcgtaaactaactgttgaatttacaggaaacccggcttggtatgccgttcaggcattgccttcattgagtcttccgacaagtaataacgctatttcctgggctactgcctactatgccaatacattggcttcgtttatcatgaacagtcagccgaagatcaaagcggtatttgaaagttggaaactgcaaggaggtacgaaagaaacgttcttgagcaatctgcaaaagaatcaggaagtgaagaatatcattttgtccgagtctccctgggtactcgaagcacagacggaagagcaacagaaagagcgcatcgccaccttgtttgatttgaataacatccgtagtaataatatcgcagctttgactcgattgcaggagttacagaactcaaatggggcatggtcctggtataaaggaatgaacggcagtcgatctgtaactacctatatcgccgaactgaatgcccgtctggctatgctgacaggtgaaaaattaagcggatcggctctttccttgcaacagaaggctttcgcttaccttcatcaatcagctttggacgagtataaggaaatcctgaaagcacagaaagacggtgtgaagtttactggcgtttcgggcagtattctgcaatatttgtatctcatcgctatttcgggagagcaggtacccgcagccaataaagcggcttatacctattatctttctaaggtaggagaattgctgacttctccttcgatggatacaaaagcgattgccgccattgtgcttgataaagccggacgcaagaaggaagcgcaggaatttgtcgcttctctgaaagaacatctgacgaagacagatgaacagggaatgttctttgctttcaacgagaatccatatacatggggcggaatgcagatgcaggctcatgtagatgtgatggaagtgctggaacagacaggtggcaataccgatacagtggaagaaatgaaactttggttgttgaagcaaaagcagacacaacagtggaattctccggtagctactgccgatgcggtatttgcattgctgatgaagggcgctaatttactcgacaatcagggagatgtacggattgtgattgctaatgaagtgctggaaactgttagtccaagtaaaacgactgttcctggattgggatatatcaaacgttctttcacacagaagaatgtggtggatgcccgcaagattgaagtggaaaagagaaatccgggtattgcctggggagctgtgtatgcagaatttgaatctcctgtgagtgatgtgaaacaacagggcggtgacctgaatgttgagaaacagttgtatgtagaacgtacggtgaataacgtccctcaattacagcctattacagccaaaacggttcttcaggtaggtgataaagtcgtttcccgtttgagcatccgcgtagaccgtccgatggactttgtacagttgaaagatcagcggggcgcttgtttcgaaccgatcggcagtatctccggttatcgttggaacaacgggcttggctattacgtagacatcaaagatgcatcgactaatttcttcttcgatcatttaggaaagggtgtatacgtgttggaatatagttaccgtgtcagtcgtgcaggaacttacgaaacaggtttggcaactatgcagtgtgcttatgcaccggaatacgcttcgcattctgcttcgatgacaattattattaaatagttccggcaggggatttttattctcaccgacgagcgaggcgttcctcaccgatgaagagggtgttcctcaccgaggaaggcatccttcgtcggtgaggaacttttttcttataaacaggggcttacaaggactgctattaagtaaagtcttttcccaatctgtgttaatctgtgtaatctgtggtgaaaaactcatctaaaacccctacatttgtgcaccaaaataaaaaatatcgcatgaaacgtagtttactatctatattatctttacttactgtcgctttggcagccgttgcccaacctcgtatctcttcaaataaagagacacataacttcggacaaattgagtggaaacgtccggtgacagtggaatataccatcactaacacgggaaaccagccattggtactgaccaacgtcacaacctcttgtgcctgtgccgtggccgactggaccaaagaaccgattgttccgggaggaaaaggagtcgtaaaagcttcttttgacgcaaaagcgttaggacattttgaaaagtcgataggaatatatagcaatgccagtccgagcttggtctatctgaagtttaccggtgaagtagtgcaggaaataaaagattatacaaagctacttccttatacaatcggaaatattcgtttagatcgtgatgagtttgctttccccgatgtctatcgcggacagcagccttcattgacctttgatatcgccaatctttcggatcgtccttacgaaccggtattgatgcatctgcctccttatctgaaaatggaagcggaacccaaagtcttgttgaaaggcaagaaaggaactatcaaactgacgctggatgcaagccagctaaaagattacggattgacacagacttctgtctacctttcccgtttctccggtgataaggtgagcgaagataatgaaataccggtttcggccattcttcttcccgacttctcacgtatgacggaaaaagattctttgaacgctcctgccatgcacatttcggaaacggatattgatcttagtatcccgttgataaagaagaataaggtaagccatgatatattgatagctaattccggaaagactccgttagtcatcagtaagttgcaggtattcaattcatcggtaggagtgagcctgaagaagacagtccttcctccggatggaatgacgaagctcaaagtaactattcgtaagcgtgacgtaggtaataagaagcatcatttacgtatcctgatgataacaaatgatccgttacgcccgaaagtcgaaatcaatatcaaacgctaaatcctatgattatggaacatcctgaaaatagtgaagaatataaggggcttgttgtcaataaaggcattgagcaaccctcatctgtgaatccctacttaaagcggaaacctaagaaacgccagctttcagtagcagagtttgtagaaggtatcgtaaaaggtgatgtcactatattgagtcaggctgtgacattggttgaaagcgtaaagcctgaacatcaggctgtctcacaagaaatcattgagaaatgtctgccattttccggaaattcgatccggattggtattagcggcgttcccggtgcgggaaagagtacatccatagatgtattcggtctgcacgtgctcgaaaaggggggcaaactggcggtattggccatcgaccctagcagtgagcgtagtaaaggcagtattttgggagataaaacccgtatggagcagctttccgtacatcctaaatcgttcatccgccctagtccgtcagccggttctttgggaggagtggcacgcaaaacacgtgaaacgattattctttgtgaagctgccggattcgataagatttttgtggagaccgtaggagtgggacagagcgaaacggctgttcactcgatggttgatttcttcctgttgattcagttgtccggtacgggcgatgaactgcaaggaattaagcgtggtattatggagatggcggatggtatcgttatcaataaggccgatggagataatctggaacgtgccaagttggctgccactcaattccgtaatgcattacatctgtttcctgcgcctgaatccggatggattcccaaagtattgacttactccggtttttataatctgggagtgaaggaggtctgggacatgatttacgaatacattgacttcgtgaaagaaaacggctattttgaatatcgccgcaacgaacaaagtaaatactggatgtatgaaagcatcaatgaacaacttcgtgacagcttttatcataatccgaagattgaagcgatgctcttggaaaaagaacagcaggtattgaaaggcaacctgacttcttttatagctgcaagaagtctgctcgatacttattttgaggatttgaaatgagactttaaatgataataaggttctgatttttagagaatacatttagcataagcgggtaggaaacatttagtctttctacccgcttgtactattaatgaggcttttctgctttttcaagatcagctctcgatttactttgagtcacaatatatactcctaggaatacaagtgcgatagcaatccctttctcccagccgaaacttccgatacccatcgcgattgctgcaatcgtagccacgatcggttgcatataattgtacatactgactaccgtaggacggagcagcctctgtgcagtcataatgcagagatacgcgaggaaactacctcctaatacgacataaagtacctgtagaatggcgacagtggaaatagaagtccattgaatcgtagaaatatcataataggagaacggaatatagcacattgaagcatatatgaacatccatttattaatcgttactgccgaatatcgttgagacaatcctttgaatacagtcaggtatatggaaaaactgatttgtgcaacgagacaaagcaagtcaccaatcaggcttccatttccgttgcttcctgcctggctgctcacaatgagaatgagcgctcccatagcagtaagcgtctccgcgattctatcttgtcgcccttttttcattcttatatttttgcgatgtataaaaatgaagcattatggatttagcagaaaatcgatttggaaaaacttggaaacatttccttgaagtattgaaagtagactacaattgttctttagccgatgtttgccgcgatcagcataccacttttggtggtatgagttcctggatgtccagacggggctatagcgttaaacaagccaaggcagatgtggtccgtgattattatggcggcgttgaaccctcccaaccgacaacttcctctccttcattcactcaaatagcacccgccatgttgtcggaagaagagtttagtcttgccgggatcacaatcacctttaacagtggaaccaccatttcggtcaaacgggccacacccggtggtgttattaaaatgttgcgcgattacgaaagaaaggagggagatccatgtattctctaacatcagccaatcgctactatctgtaccagggctttgttcgtatgaaccttggcattgacggtttattcaaaattatacgatcggaaatgaaggacttgtctcccgtttccggagatatctttttattctttggtaaaaaccgacaaagtgtaaaaatactgcgttgggatggcgatggctttcttctgtactacaagcgcctcgaaggtggaagttttgagttaccgacatttaaccccaatacaggcaattacgagatttcttatcaggttttgtcttttatcttaaatggagtgtcattaaagtctgtacggttgagaaagcgtttcaggatctaattcaacattctgattattagttatttgtgctaaagatatcatccggtttatttggccaattcgttgattttttatatctttatgccatgaaaaaggatgagatcatagagttattgaaggaacaaatcaagggattacgagatgacaacaacagactcttggaccaaatagatgctttgataaaggaggtttcttcccttaaagaggcactccttcaaaaaggcgaatctcttagcaagcaacagcgccttactaagggactcgccaaacttgtatccaacacatccgaacagcaacaggctccccaatctgccatatccgaagaagagcggcagaagatagaagcggaaaaagcagataagcgtaaagcaagaaagaataatggggccaaacgtgacatgcattatgagatggaggaagaagaacatgtcgtttatcccgatgatcccgattttgacatcaataaggcccggttgtttaccactgttcccagaatatgcgtccgctatgaatgtgtacccatgcgcttcatcaagcatgtctacaagatacacacctatacgcaagaaggtcgcctgtttgagggaaaaacaccggcttcggccttcttgaattccagctatgacggttcatttattgccggattgatggaattacgttatatacaatcgctacctgttgaaagaatcatcaactacttcgagagtcatggctttacgctgaagaaacctacggctcataagttgatagagaaagcctcaaacctcttcgaaaatctttataagtgcatccggcagacagctttgagtgatccttataaggcagccgatgaaacctattacaaaatactcgtcccggaaaagaacagcaagggaaaaggagtcaggaagggatacctttgggtggttgtcggcataaacaccaggatgatatacttgctctatgatgacggctcccggtctgaaagagttattcttaacgaattaggcagttgcaaaggtatcatacaaagcgatggttactcaccttaccggaagctcgaaagcgatgcttatcccaatatcacacgcatcccgtgcttgcaacatataaaacggaaatttatagattgcggtgagaaggacccggatgcaaaaaggatcgtggagctgataaacgcactttatcaaaacgagcataagcataaagttggggctgagggatggacggtagaacagaatcttatgcatcgaaaaaagtatgcgccggacatactcggagaaataaaagatgtgcttgatgaaatagaagaacggggggatttattacctaagagcgaactgcaggaagccattacctatcttcgcaatgagtggaatgcagtggtggacatctttaattatggtgacacttatctggacaacaatatggttgaacggatgaaccggtacatatccttatcaagaaaaaactcattgttcttcggcagccataagggggccgaacgaggcgccatactctacacgatagcactcacttgtaggatgcataaagtgaatctatttgagtatctcacggatgtgataaacagaacagccgaatggcaaccgaacacaccaattgagaaatacagggaactgcttcctgacagatgggaaaaggctaatgactaaaaagggatcattagcctttttattttaatacactatatagaatcgcggagacgcttacccatagcacctataaaaatccccaatacttttttatttgtcaccggttcttttaaatagatagctgctacaaccattgttacaatcggtagagtggtagttacgatagaagcatcaataggagaagtcatagaaagcccgaagatgaacactccttgattgaatactagcgcaaacagtgaagcaaagaagattttcagcatatcctgatggttcacatgttcctgtttgcaaaatatagaaagtagccagaaagcggcggctgctcccaccatgcggaacgtggtaactgaaatagcggaaaactcttgaagagccgacttaccgatgggagacatcaatccccacatgacgtttgctgtaagtgcaaacagatgaccacgcagatttttacttttgtccatgttgatattgattaatctacaattttttatatgaataacagtcaaacagaggaaacggttgcaaaggtagctttttattcttatatttttccaatctaatatattaataaacggacgttatggtttcaacaaaacgaagtccggtatctttttattgttgtcaaaatgcttgattttagtaaacttttgatagatgactaaaaaactctttgaaaatttgcatcttttgataaaacaattacttttgcaacatctcgctaagctgtaggagggttggcgaaattttagaaaagcgtttttagtagtcgtctttaacttcttttgagcttaaatgtaaatatttctgtgttgatagatttggttttgtctattaaagagtggtatgtgtacttaaaagatgaggacgaataatgaaacaaattcctgcgctttttttgtatctaatgaacaggttgaatcagtggaatttatagaccggaaaaacagtccatatggggatactaagttttattgttacgctcttttggggaatactggcgggaattgtagttacgattcttgtcgtgtatctgataaatgaactaatggacaccccaaagtggttggttggattgataggactttttcttctcttctttctttcctttcagtttacggcaattattggtgccggaaaagtaaaaggagtagttgaagacattactggcctaagtaatactgttagtggaaaggttgattggaataatattgaaacgacttatcctgttttaaaaccttatcttgataaagttggaacgaaagtggacgaagtatcagatcagaaaacctcggcgctttctcttattaatagtatcatcaatggctttatgtggcgacgtgcggcatgggcattaggcggagtaatgatatgtttcgtggtggctgccttgccagcattgacaggaaatggtcgtaatcgacagggacaacgaggggcgtcagcttctacccgtcatcggactacgcagcatacgagccgttcgcatcgtccgcggcgcagataaagattataagaaaacaattataaatactaaatgatattatggaaacattagacccgaaaagtcctaaccacatcttggttggtgtaggcggtacaggcggtaaagtactgaaggccattcgtaaacgcatttatcaggaatttcccaatgatgaagaacgagacaaactgtctatcggttttgtatatgtcgattctacgcgtgagatgatgacgccgggtgatccttctttccgtgtgatggggaaggatgcttcgtttacggaaagtgagtttgtggatattaagtcggtggacttgaaacagattttggataatgtatccaattatcccggattgaagactattgtgaagaatggtgcttcaatgaagaatacgttgggggaagtggggcaagctgccggacagaaacgtcgtgcgggacgtattctttttgctgcaaattgcaacaagtatctttctgctttgaaggggcagtacaataaagtgaagtctctgaccaacaaagatgaggttaatattcatatttttactggtttggccggtggtacgggatcaggtgctattattgatgttgttgctcaaacccgtgcacaagagacttataagcatgctaacattatggtttatgccatggtgcctgaattggatattcctgccggatgtcaggccggacgctaccatcagaatggttatgctgcattgaaagagttgagtgcgctgaatatcggacgttttgttccttcggacgttattcgtggggaagagaagatagagttggactttactcctaataaacagttcggtttgatgctttactctaatgtgaatgaaaatggcgtggtagtcaattcgtttacagaattgccacagttgttggcggataccgtttatttccgtctgtttctggaagagaagcatggtacgactgatgaccttctgcgttctttcagcttggagaatatcaatgacttttgtgtggagtacagcgaaaagtcgaaagggacggataaggaacgtgcccgtacgaaagcaatcaatacattcggtatcaaacgcattatttatcccgaaaaacgaatactggaacatatcacttataccgtaggtgaacgtgttctgtggcaaatgcaatataataacttcaaggatgatttcggctttgtgcaggaatcggttcgtaaggattatcgtgagttgtatatcaatgacaagaacttgcgcgactggttgctggatgatagtcatttgatgttggaagaaaagatattcgatacagataagtattgcagcaagatagaaaatttctggagtgatattaccaacagctattcttatgatgatgccaaagcggtagacccggaacctttgagattccttgaaagtatctgtgcggatacgtataagaatgctttccgtaataagcagggggtagaagtttactatcaggacaagagcaacgaccagttgttgaaggaacaggcacaatatattattgaacgtatagagaagaatctatatacgaaatggtatgagggcaccctttccttggaggatttgctgaatatctgtgatactgtattgacttacataaaagaccgcaaagagaagatcgaaactgatattgccggagtggatgaaaagatcaaggtgaatgaggacgatgcggatgctaacaattacgactataatcacttgtcgttgttgcagcgtgctaccggacgttccccccgtctctactccgatcatcagatgataatgaaagatctctatacgttgcgtacccaacgtgttgcttatgaatttgaaggtaagttgctgggtaagttacgtgctgcgttcgaagaattcagtgctgaagtaagtcagttcatcggtgtgttgctggtgtcaatggatgctgcagaaaaacgtattgccgaccgtaataagaacaccaaaggaatagccgatttgtcgagtgctattgtagaagtcagtgaagatgagaaaatgctcaagctcgaacaggcattgattctggataagaaccaacaggaaacctggtcgggaaatatccgtaaggctattacaggcaaccgtaattatgcccacttcagcgaactggctgccactacttccgaagatgctatctttgatatatttgatacggagttgagtccgaagattcgtgaaaaacacgatcaggattatcagaacgacaagattttagggctgaacgtgctgcaacagttgcaaaaggtactgcttacggatacagatattcgtaacttcgcttctacagtcatcaatcagagcggtacattcctgaaactggatgacggacaactttcgaaagcgttgaataacaacgaaaacccggtatctcatcccgaatcaatcaatcgcaagacaattttgatttcgatgccgactgatgaaggaaacgattcgctcaaagcattctctaataaactgaaagctgcattacaaggtgctttcggaaatgctacgccgggaagtacaatcaacttcaatacttccagtgatcggatgaatgaaataacggttatttccatccggtattgtttcccgatgcgtgctatcgcctggttgccttcttatgatcgtgcgtataacgatatggtgaataataagaatgaattggctgctaaagaagcccgtatcttgcttcacagcgaaggcgacggtacggaattgccggatctgatgggagaaaagaaggtatcgccgaaagactttatcccttatttcttcgtggctgctgcaaacaatattcttgctgtgcgtgaaaacgaacgggaagaaaagggttggtgtattgtcactgccgatgaatggggagctgaaatggtaacccttatcgcatcccagtttacagaactcctgaccagcgaagacctgacggaagaagtgttggatactatcaaagaaaaggtagatgaagtattgaagaatccggatttgaagatgagtgaccgtgctgctatggtagaaggtgtgaaggtagtgatgcgcgattatgtaagtaaggagtgctccagtcctacatcacccaagtatcagcaatacagcgctgaagcaaagaaagcattggaaataattaataagaaataaaaattatggcaagacctagtgaacgcgacagatacaaatatggtatctgcaccaaccgtgacaagaatggagaaggaaccccttgtcctaaatgtgaaagtaaagaagtacagaaagtaagagccggacaagacttcgtatgcgaagagtgtaaagaaccgttgcgtatggttccgcctcctaaagaaggccctaacaagaagttgattggcggtattgtcgcagctgttgtaatccttggtggtgtgggcattggaatcgcccttagcggtggagagaaaggaagcgacccgattggcggaacaaacccggactctgttgaagtggttaatcaaccacaggaagaagttgaaatggaagctgaaacaagcggttcggataccaaagaacaggtagaagtcgttgtttctgataagagcaacgcaggggggagcaataacagcggaacaggcggtatcgtaacgaaagacctcggttatgcagtttacaaaggacgtatgaagaacggcctgatgaatgatgaaaatggagtattgacatttaagacaactcatgttatagaaccgcgcgacgtgaagaagcgtgaagctaacgcaggtgaaaaagtggtcggtatctttgaagacggtcaccttattaccggtacgtggtataagagtgatggaaacaaagaggtaatcattccgtaatgaggaatccgtttactcaaatagtctacatagttcttttgctgttcccgctttcggtgtggggacagcaaacaggaaaatggggaaatggaaaactacgccagacggttgttgccatttcctccgatgttccttttgctacggcagcttacgattttacagaacggtatctgacccaattgcaaaagatgtccgttgccgagcgaaaatcgcagatggagcgtgataacgtatggattacacaagggagtatggatcttctgaatctcattaacgagcagacatcgatgaacttttccgagaaggaaaaccgttacatcgtatctcttatcaatgagtctttccttttgatcgaactctctttcccggcttcatgccaattgctgaccgggaagaatctgaaggagctggaagccgactttgtgaaaggattatcttcttatagctacactccatcctcttcgcaacccgtgcggaaggaacttaaaaagttggcgggagactattatgtgaaaacgggagatacctattacattgaagaaatcaacgggaatctttatttcgaggaaaaggatcgcgcccttcgtccggtgttcggcatggatcatcctgccgagagcgtgtttaatctatttcttagtgaagacacttctggcaacgtctccatccgcatgaccgtacgccaatatggactgaaaagagaacagatggaaattcccgtccgttcatggatatcctatatgcgtaatcagggctgcgctctctatgtaggcgttgaagcgttggaaaccaatgcggtaaaggcatatgtctttgcggtgaatactgtgttgaagtataatcatgtgatgaatgtggaagtttccaactccctcctaagcgaagggaaggggaaagtagaaggcgatataaccttgtttgtccccacccacaatatctcgtcactttttgaagaacttaattgggtaaatactaccccaaaaaggcaaattaaagtaaaatgaagaagataattactttgttattgttttgcggagcatattgcagcctgatggcacagagtgaagccgaaacaaaggcgcagatcaataagatcaagcgttcgcagtcctatctttctgccgaggctaccatgcctactgaagaagaggccattcagcaagccaaagaactgttagtcagtgaaatcaatgattgggtagccagtaaacggaaaagcggtgaagtgaaacaagttgttttgcaagacatcaatacctgtacccagcggatggatatgaagcgtggagtgagaactcgcgcgtttgtatacgtgaagaaaaatgagattgtcctcatctatggtgaaggacaaatcatgttgagtgaagaggaaaaaggagccgatttacaacccttgtctgaaatatcggaaccgatcaagatagagtccgccaagaagtctgcaaaagatgagaaaatggtttcgacggtggaaaagatcaatcccgaacaggagagtctgaatcaggttcttggggcaaaaacgatgacggagatgaagcaggtttttgcttcgctcaaagaacaggatcgaatctcgtatggtgtatatgcccctgaaacagtggcagaacaatgttatctgttgttctatacccgtacgggtgaagtaaaaggggtggtgaagaagaatggcaaagagctgaatgacgtccggacgaaagaggctacggatattgctgtctttagcggttgcggagcttattggttcattcttaaataacaaacataagtagaaagagaagaagatgaaaagtataattttgagttgggcattggtagcagtttgtacactgatgactctacctgtgcaagcccaggatgctgtgaaactggaaattgctgacggtttatatgatgccggcttaaaggcaaagatggaaaagtctaccagcgcattgctgacagaaatcaataaagcatttaaagaaaacagagcattgaatctggtatctttaggactgaccgatacggcagaacgcggattgagcgcgctatgggagaatacacatttctattgtgatgattcggaagtcgtgcaatcctgtatccgtaacggaaacgggtatcaggttcgccagatccctctaatgattaagcctgtgggcgagacactggatgatgaatatcaggaagctgtgattaactatgacgcaagcggaaacatcacacgtttcaattttacacttagcactactgtttatcagaatgtgatgaagaaaggtaaaacagtgaccgagattgcccgtcgtcaggaaatactttcctacgtagagcagttccgtacagcttacaacgaacaggatattcaatttctggataatatcttcagcgaagatgcattgattatcacaggttcggtgactgaagtcaagaaaaccgatggcacaggaattacttataataaagtgacttacaagaaacaaggcaagcaggaatatatcaacaacctgaaaaaaagttttcgtgcaaacaagtggatcaatgtccgcttcgacgatgtaaaggttgtaaaacaccctaatccgaagatggaaggtttctatggagtaaccgttcatcaactttatgccaacagcagtggctataaagatgacggttatctgtttatgttgtgggatttccgcgataaggatcaggtacagattcatgtgcgtacctggcagcctcgttggatgaatgataatcacacggaagaaatagcccaggaagatattttcactcccggtgatttcgtaattgatttataattgtaaaagtacgatgaaacgaatctatcatattctattattactaagctgtgcgttagtgatagggatgaaggcgaatgcgcaaagagttttctttgtggaacccaaagaagcccccttcattacagccggtcccaatcaggtgaagattatcatccattctaatagcgacaagctggcaatgactcataatatgggcgaggaaaaaggagtaagaaccacgaatgacgacgggacttactgctataccattaattatagttttcccgaagattatgaggatgatttcataaaatccacttttctggttcggctacccgtcgggcagaaagattttatgctcgttttgcggaaagggaaaggctatgtggggacgttcaatgagaacttcataacgattgaaaagaacaatgacggactcttcccgcagtcgaaggctgctaaagtcacgtttctgtctgccatgaaaaagctggatatagagtgtaacggcaagttgtgtttttccgacggacaggctgttccggtggccgatgtcaatttctcttcttccgtgaagcaggaaggcggtgaattgaacgcttatatcatagaattcatgttggatgaagagaaaaagacaccgacattcatcaaacgccctgtattcaaaatcaaggtaggagcttccaatgccattgatgtagacctcggaggtgacttggaatttaaaaagtcatatagctataccattgtcagcaacgtgaagattgttgaaaaagaagcttcgtttgacgaactcctcgccaaagctcaaaccaaagaggaagaagccgatttctttgctgccgccaatgcttatcaggatgcccgtagccatgaaaactgccctgtggataaacgaggtgaactggaagctcaactggggaagatgaactctgcccgtaagttccttttttatgcggagaaattcgagagacagggagcaagagtggaacgcaaagaagggtttacggccgatagcgtattcatctactatcgcggagcgatccgtagctataagaaagtgctggaatatgcccccggtacaactgaatttgaacgtcgtgcagaagaactggatgaaaaactgaaagcccacccgatgaacagcaaggtgacaacagtcactgtgaaataccaggaaataaccggcagacacccgaatggtggcgggataccgatctatgcttccaatactcccgataacccgaaacccaatagtgatgacaaacctctgggcactacccggggcgatggttcattccgtgtcgttttcaaggatacgcctcctccttacctctacttctatggcgataagaaatcatacaagatagatagcacgacaactgaaatagttttctaatcaaatctactataaattaaacatttaaactttgcaatcatgagaaacaaacatctgttattatttttcgtagctatgttaggattagcttttgtgtatccgacgtctttgagcgcccagaaagacaagaagaaaaaagagaaaaaagaactcatctgggaactgcccgaaccatcgggagatccaaccattgatgggtatctgctgtcttgtgacaccttgtatcataagatttcaacttatagagacagcctttctcactacaaatatcaggaggcttctttctccgtaggaggaaaaaactatcttttcaaatgtatgattgattccgtaaacaatcagttcttgagttacggtatgggacgttggcaggtagcacaaggtattatgacaggggctgaaattattctcgatgccaccagtcttagcctgaatacagcttctgccgcccttgctcttccaaatctgaagttgaaggcaatcaaatatttcaaaccagtcaaggacttggggcctcatgtgatcggtatggggttgaaagaaattcccgccatcaagaaagagtgtcagaacactatgcgtaagtatggcaatgcaaagaaagcagctatccttcctgaaaacatcgatccggctgtccgcaaacacctgatggctgaactgggaatcgacgcaaatacttttgaaaaatggtatggcaagtatattttcgtcaatgaagatatacaggaagctgccgaaggaactgaaaaccaagttgtggaaaagacggaagaagaaaaagacgcaggcaacaaactgaccgattacaagaacttcggtgtagccgatttgccggaaggacaggctgaaccgtcggcagaagaagaaatgaacttattgagttaatcgaaaccggacttgttcttatacaacttctgacctaaagaacagtttttgaaatacgaatggcgcagtaatgtggacaaaatctgaaatccaccttacctgcgtcattctttttatttgttacctttattgaaaactgctgtaatcgtgattcatttatcgtatgatttgtttatatttgccttgattaaacttgaatattatggaacaacaagccaattatatccgtcgtatcgagatacacggactatgggaacgctttaatataggatgggatttgcgtcccgatgtgaacatcctctccggcatcaacggagtggggaagactaccattctgaaccgttcggtgggatacctcgaagaactttccggtgaaatgaaaagtgacgagaagaacggagtgcgtctctttttcgacaatccccaggcaacctatattccttatgacgtcatccggagctacgaccgtcccctgattatgggtgacttcacagcccgcatggccgacaagaatgtaaagtctgaactggactggcagctttatctcttgcaacgccgttacctcgattatcaggtcaacattggtaataagatgattgaaatgctttccagcattgatgaagaagagcgtcgtaaagcagctacattatctgtagccaaacgtcgttttcaggatatgattgacgaactgttcagctatacacgcaaaaagatagaccggaaacggaacgatatcgctttctatcaggatggcgaactattattcccttataaactgtcgtccggtgaaaagcaaatgctggttatcctgctgaccgtactcgtgcaggacaacagccattgtgtattgtttatggatgagccggaagcctccctccatatagaatggcagcagaaactgattgctatgatacgtgaactgaatccgaatgtgcagattatcctgactacccattcgcctgccgtcattatggaaggctggctggatgccgtgacagaagtaagcgatatatctaccaccgtagggcacaagctcgacaaggattcttccaactgtaatttgtaattcgtaacctgtaatagaacaaatggcaacttcactacgagataatctgacttcttcttatttcaatgccgcccataagctttatccgaagaaagcccgccgacgtatcatcgcttacgtagaaagttatgacgacatcgctttctggcgcacattgcttgaagagtttgaagacgacgaacactatttccaagtgatgcttccttcggccacctccctggcaaaaggaaaaaagatggtactcatgaacacgctgaatacagccgaattggggagaagtctgattgcctgtgtggacagtgactatgatttcctgttgcagggagctaccaatacctcccgtaaaatcaaccggagcaggtatatttttcagacttatacctatgctattgaaaactatcattgttttgccgaaagccttcacgaagtatgtgtgcaggctacgttgaatgaccgttccattttagatttcaacttctacctgaagaagtactccgaaattgtgtatccgcttttcctctggaacgtatggttctatcgccaacgggatacttatactttccctatgtacgatttccatacttatacttctttgcgcgagattaatctccggcatccggaaaagagcttggaatcccttcaacaacgggttaatcagaagttggcagagttgaaaaggaaatttccccataacatcaatcaggtgaatggattgcggactgaatttaaagagctgggcttggtgccggaaactacttacttgtatatgcagggacaccatgtgatggataatgtggtaatgaaactactgattccggtctgcaccgtgctgcgtcgtgaacgggaacaggaaatcaagcggctggccgaacacaatgaacagttcagaaacgaactgacttgttatcagaacagccaggtgaacgtagaaatcatgctcaagaagaatgtagcctacaaaagactcttccattatgattggctacggcaggatatcagtgaatatttggaagaaggaaagaataaagaagaaaagaaacagagatcataaataaaagaaaaactaaaaaagagagagacgattgcttatgaaagaagtaaaagaagtggttgatacagtgagtgtggcattagcaaacgggcaaccggaagaagcaggtaatgtagtgatgcaagaagtgaatcatgctttgctctcgatgggagtggatgaagctatggctgataagattgataactttatcatcttattgtttattattggaatagcattacttgccaatctgatttgccgcaagattattctgcgtaccgtggctaaattggtgaaacagacaaaagctacttgggatgatattgtatttaatgataaagtaatggtgaacatcagcaggatggtggcgcctatattgatttatatatctattcctattgcttttcccgaacatgcagactctgctttgcttgattttcttcgaagactttgcatgatttatatccttgcagtctttcttcgtttcgtcagtgctttgttcacggctgtgtatctggtatatagcgcgcgtgagcaatataaagacaaacctttgaaagggcttttgcagacagcgcaagtcattctcttctttataggagctatcatcattatcagtattttgataaagcaaagtccggtggtgttgctgaccggattgggagcttctgctgcggttctgatgttggttttcaaagatagtatcatgggatttgtctccggcatccagctttccgccaataatatgctgaaggtgggtgattggatcacgatgccgaaatatggtgcggacggtacggtgatagaagtaacattgaataccgtaaaagtacgtaacttcgacaatactatcaccaccattcctccttacctgttgattagtgattctttccaaaactggcagggaatgcaggaatccggcggacgtcgtgtgaaacgctctatcaatatagatatgaccagtgtgcatttctgtacgccggagatgttggcaaaataccggaagatacaactgttgaaagactatgtggatgaaacggaaaaggtagtggaagaatataataaggaacatcatatcgacaactctgtgttagtgaatggacgccggcaaacaaatttgggagttttccgtgcctatctgactaactatctgaagaatctgcctaccgtcaatcaagacctgacctgcatggtacgtcagcttcagcctactgaaaccggtatcccattggaactttatttcttttctgccaataaagtatgggttgcctacgaaggcatacaggcagatgttttcgatcatgtgcttgccattattcccgaattcgacttgcgtgtcttccaaaacccgtcgggggcagacctgcatcggataggggtaaagatagaaaactaatcaaacgataaaacgcttataaattgtaattactatgactacaccgttatccaaccagattatccgtgaaatcactcctttatcagataaggattgcttttacattgcggagcgttataaaacggaattcacttatcctatacacaaccactccgagtttgaattgaatttcaccgaaaaggctgccggagtaaggcggattgtaggagactcttccgaagtgataggtgattatgatttggtgttgataacaggaaaagacttggagcacgtctgggaacagaacgagtgccgttcgaaagagatacgggagattacgattcagttttcttccgatcttttcttcaagagctttatcaataagaatcagttcgactctatccgccggatgctggataaagcacaaaaagggctttgtttcccgatgtccgccatactcaaaatatatccgttgctggatacgcttgcttcagagaagcaaggattttatgcggtcattaaatttatgacgatcttgtatgaactttctctctttgaggaagaggcacgtaccttgtccagttcgtcttttgccaagatagatattcattcggacagccggcgtgtgcagaaagtgcaggagtacatcaatacacattatcaggaagaaatacgtctggggcagttggccgatatggtggggatgacggatgtgtcattcagccgcttcttcaagctgcgtacaggcaagaatctttccgattatatcattgatattcggctgggctttgcttcccggttgttggtagattctacaatgtctattgccgagatttgttatgagtgcggttttaataacctttccaatttcaaccggatcttcaagaagaaaaagagttgttcgcctaaagagtttcgcgagaactaccggaagaaaaagaaactgatttagtgtattcatccttatgaactaattcgccgaatacggagaattaggtttcgatatgcataaaattaatcgtctgacggttgttatcttttcgtctgactactgttgaactttcgtctgacaattgtcagacgaaagttcaacagtagtcagacgattaattttatgcataatgagagataaaagagtgaagttccggtcttaaatttgcttataaacaagttaaactaatagcgtaagtgattgataatacgtttgtaacatcttgtcatcatcttgcaacgactctttcaatagattgtatttatttcgtcttatagttgtaatgctcaccctctatctttgccgacgtaattaaaacgtagagcaaagttagatgaaaaaactatttcttatccgattttcagtggcggctttcttttgcctgttgtgtgtacttcctgcattggctgccaatatcaagattaaaggagctgtgaaagacaaactatccaaggaacccttgataggagctacgatacgtttgctcggaactcaagccggagcagtgaccgatatggagggcaattttgaattgaacagcatgggcgttctggaaggtatgtatgacgttgagataaaatatgtaggctacaagacagaagtgcgccgtaaagtgcgtgtggagaatggaaaactggtgatactgaatctggagttggaaaccgatgcacaggaacttgccgatgtggtagttgtagctaagaagaatagggaaaatgagaatatgctgttgctcgaacagcaaaaagcagtcattgccgtacaatctgtgggtgtcagggagctttcccgcaagggtgtttcggatgcagaaggtgctgtgacgaaagttgccggagtgtctaaacaagacggagtgaaaaatgtctttgtccgtggattgggagaccgctacaatgcaactacttttaatggatttgctcttccttccgaagatccggaatataagaatatctctcttgatttcttcggtacggatattattcagtctgtaggtgtaaagaaagcattcaacgcgggaggcagcagcgatgtcggaggggcaaccattgatattgtatccaaagaactaattggtagcggtaatctgggattcggcatttccggtggcttgaatacacaaacggtagcagccgattttctgaaacaggatggagtgaacttcatgggctttgccaatcgtaccgaacctgccgatgaaaacttatggaacttcagaaataagttagacccttccgctcaacattttcaaatcaaccggagttacagtatttctggaggtaaacgattctatgtcggaaaaggcaaaaatccgctttctttcttcctgaccgccggacatacgacggattatcagtatacggatgaaatcatacgtaatacaactaccagcggtacagtctacaaagatatgaatggtaagaagtatgcggagaatatcagtcagctggcacttgccaatgtggattacgatatgcagaaccgtcatcacatcagttataatttgatgatgattcatgccaatacccagtcggtgggcgattacaacggtaagaactcgatttttagtgacgactatgaaaacctcggattcacccgtcgccaacaaacaaatgacaatatgctgatcgttaaccaactgatgactaactggggattgaccaaatcattaagtctcgatgcaggtgcttcctataatatggtgaaagggtatgaaccggatcgtcgtatcaataacctgactaaagcggaagacggctatacgttgctaaggggcaactcacaacagcgctacttctcaactttagatgaagacgacttgaatgtaaaagcaggcttggtctatcgtctgaaagataatatagaagaaatttcgaatgtccgtttcggatatacaggccgattcgtagatgataacttcaaagctacagagtataacctgaccgtaggacatgtttctagcatttcttctttggacgacttatcgcttgacgattattataaccaagaaaactttgcttccgactggttcaagatacagaagaacttagatgaatataccgtaaaaaagaatatccattccgcttatgccgaagctacctaccagtttactccccgttggattgtgaatctgggaatgaaatacgacaaggtagatattgaagtggattacaatgtgaatcgtggaggctctaaaggaaacaataccatccaaaaagattatttcctgcccagcttgaatctcaaatacaatctgaatgataaaaactcgcttcgtctgggagctagtaaaacatatacgcttccgcaggcaaaggaaatatctccttaccgttatgtcggcgtgaacttcaacagtcagggtaaccccaatctgaaaccttcggatcattataaccttgatctgaagtgggactttaatcccactccgaccgagttgatttctctcacagctttctataaattgattaagaatccaatatcccgcatcgaagtggcaagcgccggaggttatctttcttatgagaatatagcggataaggcaaccgtggcaggagtggaagtagaaatacgtaagaatctgtttgtccgtccggtgagtaatgctgcgcacggaatgaataaactctctttgggattgaatggctcttatatctacacgaatgcaaaaatgcctttggcaacggttaccaccggctcgcaactggaaggagctgcaccgtggattgtcaatttcgacctctcgcataacttcacgaagggagaacgcagttttgtcaatacattggtacttaattatgtgagtgataagatatataccattggcacacagggttatcaggatatgatggagcagggagtactgacactggattttgtgtcccaagccaaactgaacaagcatctttcctttaacctgaaagcccgcaacctgctgaatccctcttataagttaagccgcaaagcgaacgaaaacggggaaaaggtgatactgaatgattataagaaaggaataaatataagcctgggagtgtcgtgtacattctaaaccgggtgatgaaataagattattaactaataatgaaagcaaaatgaaaagattgtttgtgaactttatgacgtttgccgttatggcaacagcacttacattgactgcatgtagcagtgatagtgacggagacggtgatggtaacggagatggtggaaacaacggtgggaccggtagctctattgttgtgggcgaaaatatcctgtccggcacgctgaccggagaacagacactggaagctaaggaatatattctgaacggaacggtagttattgaaaatggaggccgtctgaatatccctgccggaacaacgattaaggctcgcgaaggtttcagcagttatctgctggtagcacaaggcggtaaactttatgctgacggtacagctgataaaccgattgttttcactgccaattcaacaacccctacatccggctattggggaggaatcattatcaatggtaaagctccgatttccggttcgaacgccaataagagtgatataggtctgacggaaatcgacaacaactataaatacggtggtaatgtcgataatgacaattccggttcactgacttatgtgaaaatctgctatgccggtgcccgctctactgccgatatcgagcacaacggattgacactgaacggtgttggaaacggtaccaagatcgagaatatctacattcttgagagcgcggatgatgccgtcgaattctttggcggtacggtgaatgtaaccaacttgttggctgtgaacccggatgatgacatgttcgacttcactcaaggatattccggtaaattgaaaaactgctatggcgtttgggaaagcggttataccagtacggaagcagatccgcgcggcattgaagcagatggtaacttggatggtgactattcggatcatttacgtcagtcggattttacggttgaaaatatgacaatcgtaaataatgctgccaatacaacggataatgtagaccgtatgcaagatgtgattaaaatccgtcgtggagcaaaagctacgatcaccaatgcccttgtcaaaggttcaggcggtacaatcgatttgattgatatgaatgacagtaaagatgcaggaaatgctgcttccagcatcagcatcacccatacattgaactttaagaataagctgaacggtacattgaatacatttaccgagccaactacgaatacaggtgcagatgcatccctgttcacttggagcggatataatttctcttccttataaataagatatagagtagcaaagtgtatcttttttaataggaggtatgggagaatttgtaacaaacagattctcccatattctatttatttgttttcgtaatcttcttttagcttttttatttgctcctttatggtatcagtgattacctttttcgtatatttgtcaacctattattttacaacgatacaaaatatgcaaacagacaacgagcgatacaaaaaaatggcttctcttgcacaaatcggatggtgggaagtagatttaacggcaggatattatttatgttccgattatctttctgatcttttgggattggacggcgacaccatctctacttcggattttctaaacctgatacgtgaagattatcgcaagcagattgcccaggagttccgggcaaattcttctatccataaggacttttacgaacaaactttcccgattcattcaaaatatggtgaggtttggctgcatacccgtctggcttttcgtgagaagggtacgggtgttgatggaggtgataagtccttcggaataatccagcgcgttgaggctcccaaggaagaagatcaaagggatgcattaaggcgtgtgaatgatttgctttgtcgtcagaattttgtttcacaatcgttgcttcgtttcctacgtgatgaggcagtagaatcttgtatcgcagatattttaagagatattctgaatctttataatggaaaaggtcgtgtttatatttttgaatacgacgaaatttatgcccatcatagttgtatctacgaagttgtttctgaaggagtatcagcagagatagacaatctgcaggacatgcctgccagtgagtcaaaatggtggagtgaacagatattatcgggcaagccgattattttaaatacactggagcagttattagaagaggctcctgatgaatatcagattcttgtagttcagggaatcaaatcgttaatggtgactcctttgatgacaggcgaccgcgtttggggatatatggggattgatttggttgagacttaccatgactggagtaatgaagattttcaatggttctcctcattgggaaatattataaatatctgtatcgagttgcgtaaaactaaggacaaggtaatccgtgaacagactttcctaaataatctgtttcattttatgccgatgggatatatacgtatgtccattatccgtgacgagaataataaaccttgtgattatcgggtgacggatgcgaatgaggtcagttcaaccttcttcgggcttcctttggagtcgtatattggttctttggcatctgaaaagcatcctgactatctccaaaaacttaattttctggaagaaatactggatagtaattcttatagggagaaagatgaatattttccaagaacggaacggtatacacattgggttatttattctcccggaaaagatgaaatagtcggtttgttcctcgattctacaggatcggtacaagctaaccgagcattggaccgtagcgagaagctctttcagaacatatttgctaatattccggcaggagtagagatctacgataaggatggctatttgatagacctgaataataaggatttggagatattcggtgtagtgaataagtcggatgtgatcggagttaacttctttgataatccgaatgtgccgcagaacatacgtgatcgtgtacggaatgaagatttagtagattttaggcttaattattcttttgaacaggcggaaggatattatgagacaaatcgttctaatgcgatagaactgtattcgaaggttagtaaattgtatgataatgagggcaacttcagcggatatatattaataagtattgataataccgaacggattgatgcaatgaatcgtatccgtgattttgagaatttcttcctgatgatatccgattatgcaaaagtaggttatgccaagttgaatctcttgaatcgcaaaggatatgctataaaacagtggtataagaatttaggtgaggaggaagatacgcttttggatgaggttgtgggtgtttatacccaaatgcaccctgaagaccgtaagcgtttccttgatttttatgatgaagtcagagacggaaaaagaaggcattttcagggtgagatgcgtattcgtcgtcccggaacgaagaatgaatggaattgggtgagtagtaatgtgatggtcactaattataaaccggaggaaaatgaaatagaaatcatcggtatcaattatgacattacagaattgaaggagactgaagccgaattgattcaggcacgcgataaagcagagatgatggatcgtttgaaaagtgctttccttgccaatatgagccatgaaatccgtacgccgctgaatgccattgtcggtttctccgatttgttggtggaaactgaagagttgtcagaacgtcaggagtatattaagattgtacgtgagaataatgatcttttgttgcaattaatttcagatatactcgatttgtcgaagattgaagcgggtacatttgagtttaccaacggagatgtagatgtaaatctgttatgtgaggatattgtccgctctatggggatgaaagcgaaagaagaggtggaactggtacttgataatcaccttccggtttgtcatgtcattagtgaccgtaaccgtatacatcaggtgatctctaattttgttaacaatgcaatgaaatttacctctgaaggtagtattcatgtgggatataaactaaaagatggcgaattggaattctatgttgaagatacaggcatcggtattgaaaaagagcagttgccacatatctttgagcgtttcgtgaagcttaattcttttgtacacggtacaggattgggactttctatctgtcagagcatcgttgaacaattaggtgggcggattggtgttgattctgaaaaaggaaaaggatcaaggttttggtttactattcccggggtgatcgtgacggaagaggtgggctgtgcccggtagagtggtaatgaggcaggtgaatatcttccttcctcattaataaaagtgggttttatataaaagagacggtcttggttttgatgtcgattgatactgacatgaaaccaagaccgtttctttggtgaaaaggtgtagtccgtttaaattccgaacgacagtttatcgatggattgatatacgatacttgcgatacccagtccgataatacctagcgtgcaaagtgccagtccccattttgtgcaacggtcgctgcgaaaagtaggaatcgggttgtcggaaggaatgatatacattgcttttacaatcaatagatagtaatacaacgaaatcactgtatttaccaatgcgatgaataccagcaagtggaaacctgcatcgaaagcagccatgaagataaaaaacttagagaagaatccggcaaacggagggatgcctgccaatgagaacagagacagagtcatcaagagagcgattttgggattcgttttataaagtcctgcgtaatcttcgagcgtgaatttctgactgcgtaatgccacgatagtgataacggcaaatactccgaggttggcggcagcgtacactaatacataatataccaatgccgtcatgccttgtgccgtaccaccgataacgcctaacataatgtatcccgcttgcgaaatactggagaacgccatcaaacgtttaaggttctgctgacggacagcaaatatattggcaatcgtgatagaagcgatggttacccaataaagtacttcctgccagtcattaatcattggagcgaatactttgataaggacagccaataatacaaatgctgccgatccttttgatataacactcaaataagcggtaactgcactcggagcaccttcgtaaacgtctgctgtccataagtggaacggaaccagtgataacttgaatgccattcctgtgaagaagaatacaaatgccatgatctgtaacggatttccgtcgatatgggcagggaggtcatcgaaataaagagtcccggcagaaccatagatcatggacagaccaaataacagcaatgcactggagagaagagctgtcagaatgtatttggcacctgcttcggcagagttgtgacggtatttatcgaaggcaatcaatgctgccatcggaatagaagctgtttcgagtccgatgaagaacatcaggaaatgtccggcggaaatcatgaggtacataccaaacaaggtagagagtgtaagtacatagaattctccttgcttgaatgaagtatcttctcttttcatccattcgtgcgccatcaggaaaacaatcagtgtgccgacgttcaggatggatttaaccactgtgtgcatcggtacataatgatacataccgccgaatgcatcggcagcagtccccggaattaagttgatagctgtatggatagccatcagaataacgggcaacattgtgttcaggcgtgctttcccaccatttttgtgtgcatccggactcatgaagaggtcagctagaaatagcagcagtaggacagctatgagcgacagctcttctcgcatatatagaaattgtgaataatccatatttacaaattaattattaaagattaaaaattaaaggttatggaatcagttgtgagactacggggagtacactttcaccaatcatgtggctaacccagaaaggagccatacctagtccggctacacaaacgatgaggcagataacggctacacgttcgtcccaagtcgcatcagtcagttcgagatgatgtttgttggtgcaggttccgtatagaattttacctaccagacgcagaatgtagactgcagtaatcacaatcgaagaacaagcgatgatagtcagtacacggtggaactggtcgttgttctggaaagagccgacgaaaatagtcatttcagcaataaaaccacttaatcccggcagaccgaggttggcaagaccggcaattacataacatacactaaggaacggcatcactttcattaagccggcaagctcgcgaacgtcacgtgtgtgtgtacgtccataaatcataccgataagagcaaagaataaggctgtcatcaatccgtgtgaaagcatctgaaggatagctcctgttgctgctgtctgattcagcatcagaatagcgaaaagaaccagtccgcagtgagatacggatgaataagcattaatatatttcaagtcggtctgtacgcaagcggagaatgcaccgtaaactacagagatacctgtcaatatcaggaatatccatgaaagttcgttagcagcttccggcatcagatacatggcgatacgaaaacatccgtaacctcccagtttcatcaatactccggcatgaagcatagatacggcagtcggggcggaagcgtgaccgtcagggctccatgtatggaacgggaaaagggcacctaatacaccgaaaccaaggaaagtcagcgggaaccagatgcattgctgtgcaaaaggtatgttgtgcaactgtgcgatttcaagaagattcatggtcgttgctcccgaaccaaaatagattccgagaataccgatcagcaggaaggcagaaccacccatcaacatgagggtcagcttcatggctgcatattctttacgtcctgatccccatacaccaatcaacaggtacatcggtatcaatgcgatttcgtagaacatgaacatggtgaataaatcgacggatataaagaatccgaatactcccatagacaatagggtgaaccagaggaaatattcttttgtcagcggttgcagacgccaggaagcgaatgtaccggtgaacacaatgacagcggacaataacaacatggctaccgaaattccgtcaacacctactgaataggatatgtgaagcggggcataccaaagcgtatctgcacggaaaagcatttctgccgtgtttccggcactacgctctcccagatacaggaatgtaagtacgacggaggcaatcagaagtgccgatgcgccagtaaccataacccctcggatggctttgattcctcgtgctgcccagagtccggccagcatcaataaggggataagtacgaatattgataagaaattcatatcgttctgtgctttataagattaatagtaggataagtgccagtgcaccgcaaaggaatacgtatgcatattgttgtacctgaccgctctgcaaaccacggatctcgtcgcttgttgtgttggttgcccatgccaggaaatcaaagaatccatccactacatgacggtcgaaccatgcgataggagtagagatgcagcggaagataatcttatgcgtgataaactggtatatatcgtcaatatagaagcggttataagcagccttgtgcagacctttgaactgtttttccaatgaatcggcaactggttgtttggcattcttgtacatccatgtagcgattgcaatcgaaataatcgcaatgacaacgctcgtaatagccaccgacggatcgagatggatagaataagattcaccattcgaactgatgaagtgtccgaaaggaataaatccggctccacaagttactactgccaggaacatcagcgggaaagtcatagccagcggactttcatgtggtgtgtggtgtgcgtggagttctttgttttccttgccccagaaaataccgtagtacagacggaacatatagaaagcagtcatcgcagcaattactgtcattacccatcccattacagggctgtattggaagcaagcagccagaatttcatctttcgagaagaagcccgagaacggaggaataccggcaatagcaagacaagcaatcaggaatgtccagtgagtgatcggcatatatttgcgtaaacctcccatcgcggacatttcgttagaatgtacagcatgaatgatactacctgcaccgaggaagagcaatgccttaaacatagcatgtgtgaagaggtggaacatggaagccatgtagcccaaacctccttcgtgaggatccatggaagtacaaacacccagagctaccatcatgaaaccaatctgtgaaatggtagagaaagccagtacgcgtttaatatctgattgtacgcaagccacacttgctgcatagaatgcggtgaatgcacctacccaagcaaccatgtgcaacgtattcggtgcataggcaatgaaaagcgggaacatacgtgccaccaaatatacaccggcaacgaccattgtagccgcatgaatcaatgcactgaccggagtaggaccttccattgcatccggcaaccagatatgcaacgggaacatggcacttttaccggcaccaccgacaaacatcaatccgagagccaacgggagcatagaagctccaccgcttatcaaggataccgtgtccggggtaaatccgaatgtaccaccataatatccgtaaatcaggataccgatcaggaaacccaaatcagcaaagcgagtaacaataaacgctttcttggaagcagcgatggcagccggttttgtataataaaaaccgattagcaggtaagaacttacccccaccagttcccagaaaaggtacatctggaagatgttggttgcaacgaccaatcccagcatagacatggtaaacagggataggaaagcgtaatagcgttgaaaaccgacttctcctttcatgtaaccgaaagagtagatatgtaccatcagtgacacggtagagataacaatcaacatcattactgatataggatcgagcaggatgcccaaatcaaagtgtaaggtctctgtaaaaggaagccacgtgaagttgtaaggtatcagtgtggcgaatgttccgtcttccagtcgtggagccgagaaatattggatagctgtaacgtaggatagtaccgctactgctcccagtatcagcgtgccaattgtgcccgctgtccggtgggacatccatttacctccgattcccagtatgagaaaggagaagaaaggaagaaggagtattagaattgttagttccatacagttttatttttattacttgatttattattatttgttcttggtgagaaacaaatcaccacttcagctcgtccaagttgcgcacttggatgcttcggagattacgataaatgttaatcatgatggcgatggctactgcagtttccgcagccgagatggcgatggaaaagagtgcaaagaaatagccttccattccctccggaaagagaaaacggttgaacacggcaaagttgatgtccgtggcattcagcattaactctacagaaatcaggatagccagtgtgttccggcgggtaaagaatccatagattcctgcaaacatcatgatggtagaaactaccagataatattccatgtgtatcatattcgaactctattttgatagttaatacttgtttatctcttacgtgcaattatgataccaccgatgatacaagccagcaacaggatgctgacagcttcgaaaggtaatatataaccgtatttgtcgctactaagcaaagcgttcccgatagcatgaatgttgatctcgtgcggggcaagattagccgtctgcatgaaattatgtttcaacgtgatagtcaggataattgctaaaccggcaatcatggtaatgagcccggccaggagcttacttcgttttgctttctcggcgcgatcaccttctccgctggtcaacaggatggagaatacataaagaacgacgataccaccggcataaaccattatctgaacagagcccaggaaggtgtaacccagcaaaaaatagatgccggccgtgccgaagagcacgaagagcaggtaggtagccgagcgtacgatacgttgggtagtcaccgtcatgatggacattgcaataataaatgctgccaaaaagtagaatactactgtttcaagtgttgatcccatatctaaacttcttttttcttttctattactttactaccgtcatgatttaatttcaggacaagtttcgtccggtcgaagactgcatgttcgaagttctggtcgaacgtgatggcatcgtgcggacaagcattgacacagagctggcagaacatacaggcgcccaaatcatattcataggttgccaggattttctttttctttccatcttctgtttcgacggtttcgctggtcactttgatggtatcgttcggacaagccatttgacacagtccgcaagctacacagcgatgttcattattctcattgtggggcatattcagcgtaccacggaaacggtcgaacattttcagctctttccggttttcgggatattgctcggtcactttcttacggaagtataccttgatgctggttttcatacccgttgccagtgtgctgatgccgtgcaccagaccacctaagtacgtatattttttatctttatattccataattttcatttatcaaaagtggaagccgaaagctacgcagcatgccattaataatagatttaccatagaaatcggaaccagatatttccattccagattcaagatctggtcgatacgcaagcgtgggaaagtccatttgatccacatcagaaggaataccacaaagaatgctttggcgaagaaccagataaagcccggaatataatccattacagtgttaaatccatccaaaccaacaatgtgcagcggcatccatcctcccaggaagatagtggcggcaacactggctacgataaacagattcaagtattctgccagatagaagaaaccgaaacccataccggagtattcagtatgatatccggctgtcagctcactttccgcttcgggaaggtcgaacgggccacggttacattctgcatttccggcaatcagatagatgatgaaagcaatgaccgcaggaatatgtcccttgaagatgaaccaaccatcagcttgtccttctacgatttcagaaaattgcatggttcccgtcagcactaccattgtcatgatactcataccaacagaaagttcataactgataatctgtgcaccgcttctcatggcaccaatcaaagagaatttgttgttactaccccaaccggccagcaagataccgacaactccaatgctggaagctgccaacaggaagaacacgcccacattgaagtccagaatcgccgcacctttattaaaaggaatacaagcgaaagtcaggaatgaagcgataatcaccatgaatggagccaggttataaaggaaatggtcggcacccttcggcatgaagatttctttggtcagcattttgagcacgtcgcagaccacttggatagaaccccatttaccaacacggttcggtccaagacgacactggaagaaaccgcagaccttacgctccatgtagatcaatatgatagccaggatggcatacagtgctacgaggcacacgccgacagctacacattctataaagatggctaatccctccggcataatggagagcagtagctcatgtatccagtttgttactatactaaagtcgaacatatatttttaataattaagtattatctgtcaatatccggaacgacataatctattgttccgccaatagcaattaagtcggcaatctttgttccccggcaaatggtgtcaattgcagcaacaagcggcaatcccgtagcacggtagtgcagacggtaaggcgttttgtcaccctgactttccaggaagacaccaaattcaccacgacttccttctactgctgcatagtaactgccttccggaacacggatgataggtttcatcttctcctgataaggtccctcgggaatattgtctattaattgttcgatgatgttcagactttccatgatttcatccatacgcaccaggtaacgggcaaagcagtcgccttccgtataaacgatttctttgaaatcgactttgtcatatacaccgtatggcattcgtttacgtacgtcacacgcccatcctgatgcacggcctgtacctccggtacaaccgaaagagatggcatcttcacggcttaacacaccgacgcctttcatacggctctgtgcgatgatgttacccgtgaatatatcgtgatattcgtggataattcctctcatatatggaatgaactcttttactcgtttgacgaagttaggatgaagatcagcctgtacaccgccaatcgtattgtagttcataatcagacgcccgccgcaagtttcttcaaagatatcgagaattttctcgcggtcacggaatccataaaagaatgctgtcaacgctcctaagtccatagcaagacaagagtagaacagcaagtgagaatcgatacgttgcaactcgtccattatggtacggatgtactgtacgcgttcactgacctcaatgcccatggctttttcaatgcacatacacaatgcatggcggttctgatgcgcgcccaaatagtccagacggtctgtcaaagccaatgtttgagggtaagtgaggctttcattcattttctcgatgcctcggtggatatacccgcagttcgcatcaatcttacgaataatttcaccttccagagaaacacggaagcgcattacaccatgagtagcagggtgctgcggaccgatgttgactacatattcttcttcgccgaacaatttcgtctctttgttcttgatggttccgtccgggttcagttctatttcttgagtcgtatcaaacgtctcttcattagtcatgcacagtgggttatccttttccgggtcgttatctttacgcatcggataaccgatccaatcgttgcgcaggtagagccggcgcatatcaggatgaccgacaaaggtgatgccataaaaatcaaaaacttcacgttcgtagaagtcggctatcttccagatgtcgctgacagacggaatttccggtagctcgcggttggttgtcgctgtttttagtgctatccgttcgcctgtaatggtagattccagatggtagactacgcctaagccgcggagtttttccggagcgtctttctcatcggctactccccagtccataccggtgaggctttcgagaaagtccatctgtttttcatttcgcaagcgcagcatctcgtcgtgtaacgctgcaggagctataaattgtatttcttgcataaatcctttaaattacagaatgtagaatcattcttcattttttaaataatccggtttcttctcttttctgtttactccaccaaagaacttttctattttcactttgcgttgcaattgcatcatgccataatagaatgcttcaggacgtggcgggcatccgggaatatatacatctaccggaagaatcttgtccactccgttcactacgtgataggacttcttgaaaggacctccgctgacagcgcatccgcctacggcaaccacatacttcggatcgggcatctggtcgtaaagtcgtttcagtaccggagccattttattggtgattgttccgcataccataatcatatcagcctgacgcgggctggcacgtgctacttcaaacccaaagcgggccatgtcataacgcgcggcacccagtgccataaattcgataccacaacaactggttgcaaaggtaagcggccacagtgaattgctgcgcccccagttgataaagtcgtcaagtactccgagggcaacattggctcctcctgcattaagttctttgaccaacttttccaatgattcattgtcgataaactcatcatacggaatagattttatttttggctttttggttatttccattccaaagctcctttcctccaggcataagcaagacccagaactaaaatgataaagaaaaagagaacactaataagtccctgtggtcccatgtcacgcataactaccgcccacggaaacagaaaagctgtttcgacatcgaacataaggaataggatggcaaacaagtagtagcctacacggaactgcatccatgatttaccacgtgtcggtataccacattcataagcctcaaacttttgcaggttgtatgaacggggagagatagcacgcgagagggctattactacaccgacaaaagcaagcgctgtcagtaaaacaacaactaaaaatgtaaaattcataattcaatagctgtttagattgaatattatatagaaataagcaattagtctattcgccctatggagaataaaaccaactgtaataaatgacgagcaaaagagtctactgtactgtaggctaaatgacaatctttctcaacccatatatataataggagataggatcgtaataatatgtaggagaatgggatgagacagggtaaagcggactttgatgtttgtaatggtcacagaaataagcgattaacaaaaacatgcttttatctgtcggaacatgtgcgacgtctgtatgactcatgtcacaggtttgagtcgtataaagattataaagacgttctaaagcatcctgaatcggacgatcttgtgatacatagcatttctcctgccgataagtcggggaggaaactttgcacatatcttccattgctccattagttgcacaatggatgagcaaagccaacactaaaagtagtccgaattttaagctttgtttcatctttctcctttaacggctgcaaatatagaactaatatttatactttttgcaaagtccgtatggcaaaaaagctttttttaactccatatcttttagattcattttttagtcagcatggtttcacaaatatcatttagaatggggtaatttctccatcttcatttgttaaaagatgcaataaaaagaatgatttacgctctttttggcgaataacacaaagaaaatacatttttttgcagattaagaaagaatacatgattatgaaacgcacactttggtttatatttttccttctaaactccttgttttacctctatgcagatagtgagaatgattctttgttgaaggtgttagacaaagtgatttctgaacgtttgatatatacccagaaaaaagaagctaccataaaagaattaaagaaaaagaaggttggccttaattcgttggaggatatatacaatttaaataaagagattatccatcaatatgaaacctttgtctgtgactcggcagaacaatacattcatgagaatattgatatagcaaaaacaatcggtaataaagaatatcttttggaagagcagctccggttggcttttgtctattctttatccggtttgtttattcaagcaaatgatatttttaagtcgataaaatgtgcggatttacccgatcatttgaaagctttgtattgctggaatcgtatacgttattatgaaaatctcattaaatacacggacgatgtacgtttttcaaacgagtatatatcggaaaaagaggcttatcgggataccgtgatgagcatcttatttgaccaatcggatgaatatagaaaagaaaaagctgtgaagcttcaagataagggaagtaccaaagaggctcttctgattttgacagagatatatgataaacaagagccggcatcccatggctatgctatgatggctatgggacttgccagggcttatcggttgattgggaattatgcactggaagaaaagtttctaatgctggctgctatgacagatacaaaactagctgtcaaagagaatgaggcattattgacattggcagttaatttgtatcataaaggagatatagacagggcttataattatataaaagtagcgttggatgatgccatcttttataattcccgttttaagaatacggtaattgctcgtatccatccgattattgaaaatacatacttgatccggttggaaaaacaaaagcagaacctccgtttctatatatttctgactagcttgtttgtggtagctcttgctatcaccctgtattttacatataaacaaacaaaaattgtatcccgggctaaacggcatcttaaagctatgaatgaggaactggtcggactgaataagaatctcgacgaagctaatctgattaaggaaaaatatgtggggtattttatgaatcaatgtgctgtttatattaataaactcgatgagtacaggaagaatgtgaacaggaaaatcaagaccggacagattgatgatttatataagtcatcctcccgaccttttgaaaaggaacttgaagaactatatcataactttgataaagcgttccttaaattgtatcctaactttgtggaaaagttcaattctttgttgaaaccggaagagcgttataaactggaaaaggaccaactgaatacagaattacgcatatttgcattgatacgattaggaattaccgatgttggacagattgctgtatttttgcattattctgtgcagacaatctataattataagagtaaagtgaagagaatgtccactcttgatagtaatatctttgaggaggaggtaaaaatgcttggttctttgtctcaaaaatgattctatccggtttaccaaaactaaaaaatggtcttgttataaactgttgattattaaatgtatatataataattgatctgtaaaacgtttactttcccgcctacttccattaagaagtaggcttttttcatctctatatttgcatcacaagatttttgataactgaatactaatctaaagaaacacacaactatgagtttttcagaattgtatcttatttattatcccaaactagttcggtttgcaaaagaatttgtgatgtcggaagaggatgcggagaacataacacaagatgtgtttacagacttatgggaaaagagagagtcaatgaatcatattgagaatatgaatgcttatcttttcaggcttgtaagaaacaaatgtttggattatttaaagcataaagtattcgagcaaaagtatgtcgagaatgtgaaggcttcttttgagattgagttgaatctgaaattgcaatctttggatcgttttgatgtatatgatatatcagaaagaaatcagatggagaaactgatacgggatgctatcaatagtttgcctaaaagatgtcgtgacatatttttgttaagccgcatggaaggattgaagtatagggaaatatccgaacgtttgggcatttcggtaaatacagtggaatgtcagatgggaatagcactaaaaaagttgagagcaaaactcaatgtgacattggctgcataactttttaatgaatttatcggtattttttaggggtatttattgagataatcgttctttgataaaaaaaggactgtgtatatggagaattgtctgaataaatattttgcggatgaatttacttctgatgaaaaaacagagtttctcatagaagtggaaaacaacgaaaggctgaaggaagaatttatagaaaatcagaatttgctggcactcgttgattggatatctccggaatatgaaaataataaagaagttgtccaacataaattatatgaatttatgcgtagaatggagcaacacaaagataaatagctttaggatactatgagtaaaatttatatcatattactgactgttttcttttatgcaaatgtttattctcaacaagcttattttgttgatgggtatcatggcgggatatatggacattatccggtaaagtggaaaactcaatttattgtggatcagctggctatgcatccggactggcggatttgtatggagatagagcctgaaacatgggatacagtcagagtacagactccggaggcttatttgcgttttaaagagatggctactagtaatcaggtagagtttacgaatcctacttatgcacagccttattgctataatatctcgggagagagtataataagacagtttcaatatggtattgctaaaataaacaaacattttccggggatggattttgtaacctattcggtagaagaaccttgcttcacaagttgcttgccacaaatccttaaacaattcggctttaaatatgctgtattaaaatgtcccaatacctgttggggagggtatactgctgcttatggcggagaattggttaattgggtaggaccggacgggactgcaatattgactgttcccaggtatgcttgtgaaaaactggagccgggatcaacctggcagacaactgcgtggggaaattcggatgcttatttaaaagattgccgtaacgcaggtatcaaacaccccgttggtatgtgttttcaggatgcgggatggaagaacggcccatggctgggaagtggaaagaacacaaaaaataattctatatatatgacatggagagattacattaaaaatgtctccatcggaaaaacggatgataattggtctttttcacaggaagatatacatgtgaatcttatgtggggaagtcaggttttgcaaaaaatagcgcaagaagtacgcgtttcagaaaatagaattgtcatggcagagaaaatgtctgtaatggcttatctggaaaataaatatatttgtcgacaggcagatatggatgaggcttggcgtacactgatgttggcacaacatcatgattcgtggattgtgccttataatggactgaataggaaaggaacatgggctgatcagattaagcgatggacagacagtaccaatcatcttgcagatggaattattgaggcatctatgcagagctttaatgaaaagtttattccgcaaaataatgctcaacagcaatatatacgtgtttttaatacattaggaatgagaagaaaggaagtcgtaagtgttcttctgcctacggaatctgaaaatgcggatttaagtgtctatgactggaaaggtaaagatataggttatttggtagaaaatgaaggtaaagagataagattattttttgaggcagagattcctccctttggttattccacgtattgtataaaaaagaaagaagccggtaagaaagaggcttcggagagtagattcgttttggaaggtaataaggtgaataaacaggaatacgtggttgaaaatgatatgtataaaattgtttttgacttatcaaagggaggaaccataaaaagcctgatagctaaaaaagaagggaataaggattttgcaggtaaaacggagaaatatgctttaggggagttacgaggctttttttatgaagaaggcaaatttcgttcttctatagagactccggccaagctgacagtagtaagggataatgtatatgagcaaaaaattaagatagagggtgagattgcttcccatccgtttacacaggtaatcactctcactaaaggaacgagacggatcgattttgatttgacggttgactggaaaaagaatgtaggtattggtgaatataaagaggaacgttggcgtgataatcgtcgagcttattgtgacgatcggtttaaactaagtgtattattcccgactgatttacatgctccccgtgtctataaaaatgcaccgtttgatgtatgcgaaagcaaactgactgatactttctttggttcttgggatcaaatcaaacataatattatacttcattgggttgacttggctgaacaggaaggcgactatgctttggctttattatcagaccatactacttcttattcttatggagaggactatccgctaggactgactgctcaatattcgggtggaggactttggggacctgattataaaataacacaccctttgaggatgaagtatgcaattatacctcatcgtggcaaatgggacaaagcatcaatcgcagatgatagcgattgttggaatgaaccattgctgtattcttgctatccagtggcaaaaccggaatcgaaatcatttattgatttacagaatactggttatcaagtgagtgctcttcaaatgaaagatggaaaggtactattgcgcctgttcaattctgaaggagacgaaagattacaaaaggttaccattgacatgccattatccggagtggaggaagttgatttgaatggacaatgtatcgaaagaaagaagataaaaacacgtgcaggtaaatcggaaatgacgatttcaatgcctcgttttggtattaagactttcgttcttagtttgacttaaaataattagattattgttatgtataaagcgactgctaatcttttaattgtttgctttttgtgttggatgacgggttgctcatcaaccaataccgtatcggaagatttggttccgactgattatgtaaacccgtttattggtgccagtactagtgtaggggctgccggtgtttatcacggattaggtaaaacttttcccggagctacgactccgtatggtatggtacaggttagtcctaatacaataacgggaggtgataatggttccggatacagtgatgaacataagacaatcgaaggatttgcctttacccagatgagtggtgtgggatggtttggtgatttgggcaattttcttgtgatgcctacaactggtgaattatataaagtggcaggtaaagagaataatgatagtataaaaggatatcgttcggtttataacaaagccactgaaacggctaaggccggatattattcggtagaattgactgattatcatatcaaagtagaaagtagcgcgacaccgcactgtggaattttacattttacttatccttctagtgaccaatcgcgtattcagattgatttagctcgtagagtagggggaacatctacttcgcagtatattaaagttgtagatgattacaccattcaaggatggatgaagtgcacacctgatggtggtggatggggtaatggtgaaggaaaagccgattatactgtttattattatgcacaatttagtaaacctttgactaattatggcttttggagtgcagatattcccgagcattgggttcggaaacgtgatgaagtagtgagtattccttatttgactcgtgtatcacaagctccggttataaaagacaagaaagaactgacgggtaaacatctgggcttttttactgaatttccaacgaaggagggagagactgtagagatgaaagttggtatctcttttgttgatatggagggtgctgcaaataactttgaacaagaaatagcctctaaaaattttggacaagtaaagcaggaagctactgaattgtggaataaagaacttaatcgtgtccggatatccggtggtacggatgatgaaaaaacgatattctatactgccatgtatcatacgatgattgatcctcgtatctatacagatgtagacggacgttatgtaggcggtgattataaaatacatacggctgacagcacttttacaaaacgtactatattcagtggatgggatgtatttcgtagtcagtttcctttgcagactataattaatccgcgtttagtaagtgatgaactgaactcattgattactatggcagatcagagtgggcgcgaatactatgaacgttgggaattgctgaattcctattccggctgtatgttgggaaatcctgctttgtctgttttggcagatgcgtatatcaaagggattcgtacgtatgatgtagagaaagcgtatcgttatgccattaacacatcccgtcgttttggtaatgattcattggggtatgctccggaaccattgagtatttcaacaactttggagtatgcttatactgattggtgtatatctcaattagcgaaagctatggggaaagaagacgatgccaaatgtttctatgaaaagggacaggcatatcattctatttttgataaagaaaagggatggttccgtccccgtaaagcagatggtgcatgggtagaatggccggagaatgcacgtcttaaagaatggtatgggtgtatagaagcaaactcttatcagcaaggttggtttgtacctcacgatgttccgggaatggtgaacttgatgggtggtaaggagaaagttattgcggatttaacagatttctttaataaaactccttctaatatgctgtggaatgaatattataaccatgcgaatgaacctgtgcacttcgttccttttttgttcaatcagcttgaagttccctggtatactcaaaaatggacacgctatacatgtgaaaaggcttatgcaaacaaagttgaagggattgttggcaatgaagatgtaggtcagatgtcagcgtggtatgtgttggctgcttccggtattcatccttcctgtccgggaaatacacgtatggagattacaagtccggtttttgataaggtagagttcaatcttgatcccagttattatactggtaagaaattcacggtgatagctcataataacagcataaataacgtctatatacaaaaagctttgttgaacggtcaggaatacaataaatgttatcttgattttgcggacattgcagccggaggtacattggagctgtttatgggtgataaacctaatgttgagtggggactttgattgaataacatactctaaaacaaattgttactttaaaatcttgatagtatgatgaataaacttgggcttatcattgtatcggttatattagctctaatccagacagggtgtgcagagcagagtacatggatgtctttgaacagctctaatcctcggattatctgggaagtgaaaccccaggcagatttagagaacataaccggagagcagatttctactccggaatttaaaatgtccgattacgttaaaggtgtggttcctggaactgtttttactgcttatgttgaagcaggaatcgttcctgatcctaattatgccgataatatttataaagtagacgaaacgttttataaccgtcctttctggtatcgtacggaattcgaactcccgtcttcttattcggaggggaagcgggtatggcttcatttcgacaatacgaaccgctttgccgatttctattttaatggcgagaagatatcaggaacaaaaacatctactaaagatgtaagcggtcacatgttacgttcgaagtttgatgtaaccaatttgataaagaaatccggtaagaatgtgatagctgttctgattaccgatgccgatcagaaaaagacgcgtaaggctaaagacccgtatggagttgcgtgtagccccagttatctggctggtgccggttgggactggatgccatacgttccgggacgtctggctggtatcacaggcaatgcttatcttgtggtaacgggagatgtagtgatggaagatccttgggtacgttcagagttaccgaccttgcagaaagcagagctttctgtctcaacagatattagaaatgcttcttcttcccccaaagaagtcgttgtatccggagtgattcagccggggaatatttctttctctaaagacattcgggtagaaggaggaacaacagccagactatctattaacaaagatgatatagcgcaattggttgttgatcatccgaggctttggtggccgaatggttatggtgatcccaatctctatacttgcaagctgacttgttctgtagatggaaaagtgtcggatgtaaaagaaatgacattcggtatcaagaagtatgagtataaaatggtcgataatgtagtgggatatcctgttcttacattctttatcaatggacagaagatttatctgaaagggggaaactggggaatgagcgaatatctgcttcgctgccagggcaaagaatatgaaacgaaaatcagacttcataaggagatgaattacaatatgatccgtctatggactggttgtgttacagatgatgagttttatgattattgtgataaatatggaattatggtatggaatgatttctggttatatgtagcatacaatgacgtggcgcaaccggaagcatttaaagcgaatgcccttgataaagtcagacgcctcagaaaccatccttctattgctatttggtgtggagctaatgaaacgcacccggcacctgatttggataattacctgcgtgaaatgattgcgaaggaggacaataatgaccgtatgtataagtcttgctccaatcaggatggattgtccggaagtggttggtggggaaatcaacctccaagacaccattttgaaacttcaggcagtaatctggcatttaatacaccggcttatccatacggtattgatcacggttacggtatgcgtacagaaataggaacggccactttccccacatttgaaagtatcaaagagtttatcccgcaaaaagactggtggcctctgcctactgatgagcagttgaagaatgatgatgacaatgtatggaacaaacatttcttcggtaaggaagcgtctaatgccaacccggttaattataagaattcagtgaacacacagtacggagaatcatccggattggaagaattctgcgagaaagcgcaaatgctgaatatcgaagtgatgaaaggtatgtatgaggcttggaacgataagatgtggaatgatgcagccggacttctgatctggatgagccatccggcttatccctcgtttgtatggcagacttatgactattattacgatcctacaggtgcttattggggagcaaaaaaggcttgtgaacctttacatatccaatggaatgcttccaataacaatataaaagtaataaatactacagcaaaagacttgaaaggcgcagtagctaaagctataatttatgacctgaatggaaaagaagtaccggcctacggacagacaaagcaggtcgatgtggcagccagcaatattgcagaagcattttccttgaattttaaccctttcgaaattgatgatgagaaaccaaaggagatagaagaagagatcgaagaactgactccgcttcattttatcaagttggaactgatagatgccaaaggtaatctaatctctgaaaacttctattggcggaatggcgtgaatgatcttgattatacattgctgaatacacttccagaggccgatttgtcttgccgattggtggataaatcgatgtctgacggaaagatgaagattgctgtaaagaacaattccgggactgtggcttttgctaatcgggtgaggcttgttaataaggctacgcagaaaagaatacttccaattattatgtccgataattatgtgacgttgatgccgggcgaagaaaaggttatcactatggaggcgactcccgaactgttgaaaggaggcgtaagtgtattggtgaaacagtatgggaaagcagagaagaataagctggatatagcagattgattgttgtacggttatctttatggtttgattaaaagaataaagaaaatggctaatagactaaaaatgaggatactcttgttgttatctttagtttatataaattgcgattacttacaggcacaaacaacaataccccggtttgaagaaggggaacgtgtcgtatttgtaggaaacagcattactcacggcggacattatcattcatttatctggttgtattacatgactcgtttcccggataaaccgattactatcatgaatgccggaattggtggagagagtgcgtgggatatgaaggatcgtttggactatgatgttttcaacaggaaaccaacttatgtgactctaactttcggtatgaacgataccggttatgatatttacatgaaagacaatgcaaaagaactgtcggaacaacggattgcaaagtcattggaaagctatcgggaaatagaagaacgcttactggctaaaaataaaataaagaaagtattgattggtggttctccttatgatgagacttccaagtttaataattttatattgcgtaataagaataacgctattttaaaaataatagatgcccaacgtacatcggctaaaaagaatggctggggttttgttgattttaaccaaccgatgcgtgagataagcagaaaagagcaggaggcagattctacatttacattctgcaggatagatagaattcatccggataatgatggacagatggttatggcctatttgtttctgaaagcacagggactggctggggatgaagtgtcatcagtatctattgatgcatatcattcatctgtaataactcataagaactgtaagatttcaaaactgaaaaagaacggaactgatctgacttttgattatctggcgtatgctcttccttatccgctggattctatttctagaagtggctggggaaataaaaggtcacaacgcgatgcaatgcggttggttccatttatggaagagtttaatcaggaacgttttcaggtaacaaacttagagaaaggaatgtatcggttaactatagacaatcagtttattgacaatctctcatccgaaaagttggcgaatggagtgaatttggcagattacccgaatactccccaatatcaacaagctgcgaaaatcatgtatctgaatgaagaacggtttgaagtggagaaacgcttcagagaatacttgtggaccgaatattcattcttgaaaaaggaaggattattgtttgctgatgatcagaaagctatcgataaactaaaagaatatttacctaaagacgggtttcttaggatgagctacgattggtatataaaagcgatgaatcccgaaatacgggaggtttggagcaattatatgaagaatcttgttgaaacaatttataaaatcaataaacctgtcactcataaagtgaggctggcaagagttgaataataatagaaaatgaatagtatgaaacggttattatgtttagtttgttgtttctgttggctgtctgtgatagtgtatggaagtaagaaaacatctactttttatttgtcagagttgaaatgtgaaaatcttattaatcctttggggattgataatgtgacccctcacttcagttggaagttaaagggggacggctggaaaggcgggcaaacttattatgagatacaggtagcttcggatagtattctgttggcacaggataaagctgatttatggaatactgggaaattgaaatccgatgtttctgttatggtgccttatcgagggaagactttaacttctcgttctttgtgttattggcgggtacgcgtttgggatgctaaaaaacaaatttcttcatggagtcctgttgctcgttttggggttggtatcttaaataaatcacagatgcagagagaatatattggggcttctgctgaaggtggtaagatttgtgctcctattcttcgcaaaaaagtgaagctgactcaaagggagacttctttcctgcatgtaaacacgttggggtatcacgaaatttatgtcaatgggaaaaaggtaggagaagatgtccttacgcctgctgtatcacatttatctaaacgttcattgattgttacttatgatattactccttatttacgagaaggagaaaatgatttgcttatctggctgggacaaggttggtataaaacgacgactttcggagctgcttatgaaggtccgctggtaaaagcagaattggatgtgttgagaaatggtaaatgggaagtcgtaacgaagacagacggatcatggtacggacgtgaaagtggctattcggatacaggtacttggcgtgctttgcagtttggaggtgagagggtggatggaaggattcttccgcgagatctttcaacacaggctttagacaaaatggaatggattcctgttgtgaaagtgaatgttcccgatcatatcgcttcccctcaaatgtgtgaggtaaacaagatacatcagattttgccggctgtttctgtaaagaagctggctgaaggtctctggctggtagatatgggaaaggttcagaccggatggtttgagatgcaaatgcctatattgccggcaggtcatgaagttattatggaatatagtgataatttgacgaaagacggtgaatttgacaagcaaggtgaaagtgatatttatatatctggtggtaagcaaggagaatacttcagaaataaattcaatcatcacgcttttcgatatgtgcgaatatccaatcttcctcagaaaccggaaacaggtgcaatgaaatctatgcaaatttatggagattataaacagaccgcaacttttgaatgttcggataccgacttgaatgctattcaccaaatgattcagtatacgatgaaatgtctgacttttagtggatatatggtagactgtccgcatttggaacgtgcaggatatggtggtgatggaaactcctcaacgatgtctttgcaaacgatgtacgatgtagctccaacatttgaaaactgggtgcaaacatggggagactccatgcgtgaaggaggaagtttgccgcatgttggtcctaatccgggtgccggtggcggtggtccgtattggtgcggattctttgtacaggctccctggagaacgtatgtcaactataatgatccccgcttgattgagaaatattattctcaaatgaaagagtggtttaagtatgttgataagtatacagtagatggtttgctgaaacgttggcccgataccaaataccgtgactggtatttgggagattggctggcacctatgggggtagatgctggtaatcaggcttctgtggatttggtaagtaactgttttatcagcgaatgcttgggcactatgtataagacagccttaacattaggcaaaaaagaagaggcggaagagtttgctatccgtagagaaaaactcaataagttgattcatcagacattctaccgtgtggatgaagggatctattctaccggctcacagttggatatgtgctatcctatgttggtaggtgttgtacccgattctttgtacaataaagtgaaagagaatgtcgttacgatgaccgaagaaaaacacaaaggacatattgctgttggtctggttggagtgcctattttgacagaatgggctgttcggaataaacaagtggatttcttctatcaaatgatgaagaaacgtgattatcccggttatctgtatatgattgaccatggtgcgacagcgacttgggaatattggagcggagaacgaagtcgtgtgcacaattgttacaatggaattggtacttggttttatcaggctgtaggaggaatacgtcttgacgaggctaaacctggatatcgtcacttctatgtcgatcctcaaattccaaacggtgtgacctgggcaaaagtaacgaaagaatcaccttatggcacaattgttgttaattggaagttgaaagatgataatcagttgaatcttcaattgacagttcctgccggaacaatggctacagtttgcatccctaataatgctgtctcatgtaaaaagaataagaagaaagtgagcgttaaggagcagactgttgatgtagaagcagggcattatgattttctatttaatttgaaatagataccctactagagtgtatttatgattttcatttctcatattctcattcattaatcataaatagcagaaaactaatagaatagactatgagaaatgatttctaagacggcatttctcatagtttttccgtcaaataccccgtattttaccttgtttctcatacttgttagattcatttctcatagtgtttttccaatcaacctatacaagaataaagaagcaactagtcaacgattatcagggaagtacatattcttcttgtcccatatattgtgggaaggtattccctattaacagggaaaagattctcttattttgtgggaataaattctcataatattagggaacattttcccataatatatgggacaatcggaactacagtttatcttcaaccagaaaaaaggagaagtatagtatttaactatgagaaatactctgaaatactatgagaataaggtgaattttaagctaaaatagaaggtgtattatgagaaatgccgtcttagaaagtatttctcataagctatttatttgactatttgttgtttatcagtcacctatgagaatatgagaaatgaaatttaaaaatcttctctagagactgctgaattttttattgatacatttaaaaacgtaccgtaataaactaaattatcatttaatttaaatctgtgcagaaacaaaattaactttaggaaaattgtcttgtgaattgacttgaagttaatcgccttgattattatttttatatgattcttttttagtggtttcccaaatttcaagcgttcataggataaagttcaatagatataggtaaaaagttaggattggtgtttgcatttccacaatatttctccggtttatacattatctttttgtaagttgaccggaggagttgctgggaatttcgtttgactaaaatgaaaaatatgatatcatgaaaaatgttttagtaatgattacgtgtgctttgatttgctttttatcagcgtgctcgaatgtaaaagatgtgccttctatagtaactattgaaaaaggcttccgggaaattcccgatagtatccgagtgggatgttattggtattggatttcagataatatttcagaagagggagtggttaaagatctgtatgctatgaaaaaggcagggattactcgtgcttacataggaaatattgatataggaggaaatgcttatggaaatgtgaagatatttgcgcctgaatggtgggatgctgtacatgcagcactgaaaactgcgacagaactggatatggaaataggaatgtttaatagtcccggatggagtcagtcgggaggaccgtgggtgaagccggaacagagtatgcgttatctggcagccaccgatacgatggtgaaaggtccgcgaacactttcatatacgatacctgaatattcggattcgatgcaattggtccgtgttatagcttatcctacacaaagtgatgtgtttaaaaaagaatggaaactgcaacagaaaggatatgaacccgtagtttttgaaatgcaccttgatgaaccacagcctattcgcagttttacttttacaacaaacaattatgtatggaccaaagcggaattgcaagctaaagtcggtgatgcctataaaacgatccggaagtttgagatagaccgtaccaatggtatgccttctgttggcttttttaccaatgctccggtcgttctctcacttcctgctacgaaatctgcggactttcgtttattgctggataagccgattaattcttatggggatgtagaagccacggccactctttctgccgcaaaaatgatagaacgatatccggaacaatctctggcaaagatgtatcaacgtcccgatccaaaatgggattcgtatatgtgggctaatcaagattggtataacgactcggaaggctttgtgataccacagaataaggtgatcgatttaactgcctctctttcttcagacggaacgctgacgtggaatgtaccggaaggtgactggattatttcttgcctgaaaatgaaaacgacaggtgtgacaaatacacctgccacacctgaagcaaccggacttgaagtggataaaatgagtaagcaacatgtcaacacacattttgatgcttatatgggtgaaattcttcgtcgtatccctgaagctgatcgtaaaagcctgaaaatagtagtgcaagacagctacgagacgggtagccaaaattggacggatgatatgctggaacgtttcataaaagcttatggatatgatccgcttccttatctgcctactctgtatggtaaagtagtagggaatgaagatatgtcttctcgtttcctttgggacttgcgccgtctgattgcagatggagtttcatacgattatgtaggtggtttgagggatatttgccatcaacatggactcacaacttggttggaaaattatgggcattggggatttccgggagagttcttgcaatatggcggtcaatctgatgagattagtggtgaattttggaactttggtgatttggggctaattgagaatcgttgtgcttcctcttgtggacatatctacggtaaaaagcgtatttgggcggagtcttgtaccagtggaggacctaatttcacgaattatccggccaatatgaaagcgcggatagatcgtttcttcacagaaggtatcaatgcatcattgcttcatctgtatattcatcaaccgtatgaggatcgcaatcctggtatgagtgcttggtttggaagtgatttcaatcggaaaaatacttggtttagtcagatggatttatttacagactatctgcggaggtcgaacttccttttacagcaaggtacttatgtggcggatgttgcttatttcatcggtgaagatactcccaaaatgaccggctcgatagaccctcaactaccaaaagggtattcgtttgacttcattaatgccgaggtatttttaacgagggctgttgtaaaggatggtcatttaaccctgcctgatggaatgaagtaccgtttactagtattgccaaatcaaaaatcaatgcgtcccgaagtactgggaaggattagtgaattggtacacgatggtttggctgtttatggtgaggctcctgaatattctccgagtctgtccggttatcctgaagtagacaaggaggtatcacgtattggtacagaattgtttgctaacgatcattatggaaaaggaagggtatttcaacgaggcattgttttacaagatgtgttggatgcactgaatatacatcctgattttagatgtggaaaggatatgccagttttgtttatacatcgaactctaccggatgcggaaatttattttgtgtccaatcagcataatgagagagtggtttttaacggagaatttcgtgtgtcgcaggaattctccccagaactttggaatcctgttacgggagagatccgttatttaccggattttaaaagtaaagaaggctatatatctttaccggttgagttggaaggaaatgaaagtgcctttatcgtttttcgtaagaataacaagctaacagaaacgaaagataattttccgcagaaagtaacagtttgtaagataaataccccttggaggatcacgtttgaagcaggtaagcgtggaccggaaacaccggtagtctggtctcaattgaaagattggatgaattcagagaatgacagtattaaatacttctctggccaggctgtttatgaaactactttcacattagaaaaacttccgcagaagaacttgtatattgatttgggtaatgtaatggtgatggcaaaagtgacactgaacggacaatatgtaggtggggtatggacgttcccatatcgtttgaatgtgacaggctatttaaaggaaggtgagaataaattagagataacagtcgtcaataattggcaaaatcgtctaatcggcgatcaacgttttcctgaagaccaacgtctgacgtggacgactattaatccttggaaagctgattcttcattacagtcttcggggctgcttggacctgtagaaattcaggcttttgattataaaatagttaaacccgaatgaattgttttttatccttgtagtggcattttcattcataaccgttctttgtataagtatagtttttcaaaaacgttctgaagtgcatatttaacaaagtgatattgtataccacaaaaaaaagtaattctgtttagtggtgtattgttttttaatcgttctaattgaaaatgaacaaatgtaatctgataaaaaaaactaataataatgaatattactgtttacagagtttataaacgatttattaaccgctatttctattgtatatgaaaagcttgttttatttatttttacctattgcaggtgtatggttgttttcatcttgtgctaatttagagcaagttgagacgacggatcttgatcgggaatctgtttttgcagatagtgcatatacggcaggattcctttctcaaatttatgtagatgttggttatgatgttaagcccaatcgatacactactaatattttgggggtaacaaaagaacatggaggcttgcagactgcttgtgacgaggctgcttataaagtagtctctgatgttactaatgatgtaatgtttgcaaccgggactattaattcgcttaatgtattggaagatgatgtttggaagaaggcatatactaatatccgaagggtgaatttatttatgaagtatgtagatggtgctccgttacttgaatccactaagattcagtataaggcggaagcccgattcttgcgtgcatggtattatgcaatgatgttacgtcattatggtggagtgcctttgcttggtgataccatatatgaggtagaagatgatatgaaaacaaagcgtgacacatatgctgattgtgtgaaatatattgtagacgaatgtgagttggctgcaaaagatttgcctgttgtattcagcggtatgaataatggacgcgccacagctggcgcatgtaaggggctgatttcgcgtattcgtttatatgaagctagtaaattattcaatggtagtgattttggtacatctactaattgcccaaaagagttgataggtcatcctaattatgataaagaacgttggaaggcagctgttgatgcagctctcgatgtgataaaactgaatcgttatgctatttacacgcgtcatgtagaagctgatggatacaatccaggaagatcagaaccgggatggggattttatgcaatcttccataataatgactttggtaaagtgtcggatggtgcctatgtgacgtattcaaatggatcgtactgcgaaatgatattcgaatgcaggccaggggaaggtaatcaacgtgaagcattgtttggtcctcccacgtgtggtggtaacggtaatggaggttatatttatcacgacttagtagaacagttcccgatgaaagatggaaagaaaataggggaaagcgataaatatccttatgatcccatgaaaccagcagaaggacgtgacccacgttttgctaatacagttgtttggaatggtagtgtaataatgagtggaggtgataaagatcacgtcgtctatactcataaaggagtgggatcgactactgatgcttttggaagtggtacgccgaccggatattatattcggaaatttagtcatcgtcaattagctggaaattggtttgtaggtacttcacaggcattcgacttgattcgctatgctgaaattctgttgaattatgcagaagcagtcaatgaatattacggtccagatcataaagatgttttaggagaacaaattataagtccatttgaagtattgaaagtacttcgtgaacgtgctggtatcgatgctggaaatgatggtaggtacggattagaagagggtgtagaaacagattacaggaaaatgaaagacgctattcgcttggaacgtcgtattgagctagcttttgagggacatcgtttctttgatgtgcgtcgatggatgattgctgaagatactgaaaatatgcagatgcatggattcgaaataacaaaaactataacagaaaaaggtaaggtggttccggtccgtaaacatactttccgtaaagcgatgtacttctttcctattccctataaagaaatagtgaagtctgaagatttaatacaaaatccttattatgaataattttaagatatagagtatagtatgaaattaaatgtgcgatttataatgggggctttctttgcattaacaataattgttagctcttgcaatacgtttaaagacgaaataacccctgataattattcagaagtagctaaaaatataaatgccaactggcaattatcagctgtttctcgaaatggagtggacattacggatatgatggattttacgcgtttccatattgtgctgaatgaagataatacatataaaatagaaaactatttaccttttatagtgaaaggtaatggtagctggagtgtagatgatcccatatatccgtttcatcttttttttaaagaaaatgggacagagaaagaaataaagacgcttattgggtttcgaacagtaaatggaaagcgtcagatgtctatcactttgagtccgggatgtcatacaaataagtatgtatatacttttaagcaagtaacagaataatgttttaaagtaattttatgaaaacgaatatcaaaaaaaataggattgcttgggtaagcagtagcattctgatggcgcttgttgtagtcggatgtgtttatcttgataaagttaatgtcaaccaaggcacggaagagaatcccatttattgggcaaaagctggagaaattgcaacttttactattgatgctcatattgactgtgcagaaaatcaaacgaaaaaatttcttatggcaatcttggttccgaaaagttggaatgcacgtgagaatacaactgtaacctatacggctacaggtaaggaagatggagttacttcgttgcccatgtcacctgttaacccccaattagtgcccaaaaatgtggatgtaccttggtcggaagtattaagggctgaatatggtgtgggtaccaatgtgttgaacgatatggaatgggtagcttttagtacgaataagatctatacgatgcttgagcatgagaatgctactatcaaaataactttgaaatgtaaaaccggacctaaaaatctccgttttaagcctgctttcttcattaactttgcggaagacgactttcctgcaaatgacgaacacggtatgaaatacaaaaagtatgtacctagcaacgattgcttcgaagtggtagaaggagtaggcgaagtaactgatttctgtgcttttcactataataaagttgaaccgctagcagcattacaagatgactttgtgacattcactttcctaggtgatacatataccaataaccttaaggaggctgctgtctatttggaagctgtagcatatacagataatggcaatacgtatgaagtaaaagaaaagagtgcaaagacgttgatgcctaaggaagacagttttcttagtaatatctttaatttaacaatttggccggcagaatattttggaattcaagagggggaaacgatcacccgtattgagtacatctttacaaataaggatggtacacttagcattacgggtactgatgataaaatagctgcggaagggggagaggtagaaggtgaaaaagaaccttttatttgcgaacttgcctgtgaataaagccatcaagcatttgttctttttattaatattaaaagatagataaattatatgtataatatagtaactaaaataagtagacggttttattttgtattgcttgccatgggtatgctttggggaatgatgtctccaaaagtatttgcacaggaagtaggtggtgctaatattactggtaaggtggttgaccaatatggtaatccggtttcggatgtaacgatcaccatgaaaaatagtgattttaaagttataacagggattgatggagtttttacatttcaaatgaaaaaaggagatgtattgcgtttgtcacatccggagttcattcacaaagaagttaaggttaataagttgaagaatacagagcgtgtgttcaaggtgactttaaatgaacaatttatcaaagacaagggaactgttagtggtccttatgaaccaaaaaataagaaaaactatttaggatctgctgctactgtgtatacggacgagttgtcatctatgatggggacaactatcttaccggctttgcaaggccgtatggcaggtttgaatgttagtcagtatgcaggagctcgtgcgcatcagattgctgctaattcaagaaatgatttgattggtgctatacctttgtttggccagggattttatagtgataacactgaattcagtgtcggttcacgtggcaatgctccgatcgtagttgttgatggtatccagagagaactatattcactcgatcccgaagctatcgagtcggtatctgtacagaaagatgcgttgtcatcaatgtttttgggcatgcgcagttcgcgtggtactttactaattacaactaaagagccgattaaagaaggttttcaattgtcttttacgggacgtttcggcgtacagagtgcattaaaaactcctaagcctctatcagcatatcaatatgcatatttgttgaatgaagcattgcaaaatgacggaaaggatccgctttattcatacgatgactttaataagtttcgtacacattctaatccttacacacatcctgatataaattggttcgatgaaatattgaataaaaatgctattacacaagcatataatctaaatgtaacaggaggtaatagggttacacaatattttgtaagtgttggttatcagggtgaaaaagggttgtttgcaaatcccacagataatgatgcccacgatacgaatttatcatattcacgttatatgattacttcgaaggtgaacatcaatataactgatgactttacagcaaaagtaactttacttggtcgtgtggaagatggtaatcaacctggagtatcttatgggaacttattaaattctatttataatactcctaataatgcttatcctattaaaaacccaaatggaacgtggggtggtaataaaacgtttgacaataacctgatgtctcaatcgattaactcaggctatatcaaggatagcgcgagagatatggtgggaggtgttaacttgaaatatgattttggtaaatttgtggaaggtctgtcagttcgtatggtgggtaatgtctctattcagaaccgttcgtatgttcaaagaagcaaacgtgctccggtatatgcttatggatttgataaagaagggaaagaatcctatattttgcatggggccacaaatacacaatctaatttttttaattcagtgactagctatcaacaaatgtatggtcagattgctgtcgactacaatcggcgctttggaaaacatggagtaaaagctactttaatgagcgatactcgtcaaaccttggtcaattatgatttaccccagttgccttccaatattataggtgacgtagcttatgattatgcggagaaatattttgtacaggctgctgtgagtgaaagttatttcaatcgttatgctccgggtaaccgttggggaactttctacgcatttggtcttggctgggatgtgagcaaagaaaattttatggaggatgctaattggttggatcagctaaagttacgtggaacatttggtaagacggggaatggtatggataattcaggttattatggatatcgacaaacattttctagcaacgtggcagctggttacccaatgggaataaacttgggtatgggaaatctaacaacggaaaatactccgttggcaaatccttacttgacatgggaaaaagcgtataaattgaatgtgggagttgatttatcattatttgataaccgtttgaaactgaccgcagattattataatgacaaatattttgatttgctccaaaacagaggcaaaagtatccagttaattggacagtattatccgtcagaaaatattggtaaggtgcgtcgttatggtggagaactttcagtgacttatcaagaccgtgtgagcaatttcaattattatatttctgctaactggagttgtgaccaaagtaaattgctctatatggacgaacagtatgttccagaagaatatttgcgtcagacagggcgtcctgtaggagtcatgtacggattggtagccgatggattctttacttccaaagaagaaatagaaaatagtccggtaatcgaaggatttaataatattcagccaggtgatattaaatacaaagacttgaatggtgataaagtgattaatgagtttgaccgtactgtaattggtggcgataaaccgtattcttactttggaattgatttgggttttgagtggaaaggactagaattctctatgctttggcaaggagcatataatcgtgattactatttaggtgatgtgactctgactgagggcttccaacaaaatggtcaattttatggtcaggcttatgaaaatatgttagggagatggactccggaaacagctgaaactgctacgttcccaagactgacggctggtggaaataattataatcgtggtaatggctggaactcctctttctggttacgttccggaaactatatccgattgaagaatattagtttgggatataacttacccgattcattttgtcgtaacaatttgggcggtttgcgtgtaaaactgtttgtcaatggacaaaacttgtttacgaagtctgcgtgcgatttagttgacccggaagttagcttcacaagctatccgttacaacgttgtattagtacaggtattaatatcagattttaatgaattattgtatggtacgaaataaatatttaacattttttggtgcatgtttgttgttcatggcttcggcttgtaacgatggatatgagaaagaaccagtggaacaattcacacttgattatttgttttccaaagtcgattcggctggtgtacaatccagacgatttctgaacaatatctattatgaacatttatatagtggatacaatcgggtggatggtgattttttagatgctgcttcggatgatgctgtttccgtcaataataatgacccagcagtctataaattgttagttggacgctattcggcattgactcgtgtaacagatatggaatggggtgaatattatcaagggatccgtaaagcgaatatcttgattaataatattgacgtagtgcctttcaacatgaaatatacgaatgcgttgggagaggtaaaaacattgaattatacaatgaaagcggaagctcgttttttgagagcccacttttactttgaattagtgaaacgttatggcggcgttactttggtgggtgatcaagtatacgatttgaatgatgatatagagcttccccggaatacatttgctcaatgcattgattatattgttcgtgaattggatgaaattaaaaatgatcttcgttcattaccgatgtcggatggcggtgactatgcacatgcaccaacaaaagaggcttgtatggcaatgaaagccagagtattgttatatgcggctagtccgttgtttaatgagaaacctatagaacctggaaatgaattgattggatatgcttcttatgatccggaacgatggaatctggcggctcaagcagctaaagatttaattgatgagtttggtcctaatggtaaaaagacgttggatttgacagatgatttccgtaaaatatctacagaattttatagttcagataataatccggaattgattttctttcgtcctataggtaaaggaaaaggttttgaaacagctaatggtccattgggattttccggaaatgcgttgggatatggaaatactaatccgacacaaaatttagtggaatcatttttaatgaaagatggaaaaactccgggtaatagtacaaaatatgaatataatgagaagaatgatccgtatagagatcgtgatccccgtttagagttaacagtattgcatcatggttcttcttggttgaatacgcagcttcaaacaaatttcggtggagcgaataatccttcaggggccgaatatagccgaactagttattatatatctaagttcatgaaagattataaaacgaaaagcgagtatgatagtgaagcactacacttgtgggtgatgtatcgttatggagaggtattgctaaattatgctgaagcgttgaatgaatatcagtcggcaccttcacaagatgtgtatgatgctattattgcgttgaggaaacgtgcgggtatcgatgaagatgataattatggcttaggagcattagggtcgataaataaaactgatatgcgtaaaattattcaaaacgagcgacgtattgagatggcttttgaagaacaacgctattgggatatccgtcgttggagaatagctgaagaagttttcgagaaacctctggaaggtttaaatattcaaatttctggtgctgtaacgacttattataagataaatgtattgtctactacgtttaatgtgaaacgttacttctatcctattccgtactcggaagtgataaagaataaaaatatggttcaaaacccgaattggtaatatgttatgaaaagaatacttttaatattattaagtataaacctgtttgcgtttgcctttggacaatcgataacagtaaaaggaaaggtgtcttccacagatggtgaactgcttccgggagtaaatgtaaaagtgaaggatgcgacaattggtacaattacggattttgacggtaattatcagttgaaggtaaataagggtgaagtgttggaattcacttatattggttttaagaaacttactgtgaaggtcgggaaccagcgggattggaacgtagagctaacgccagacttgacgaatcttgatgaggtagtggtagtagcttatggtaaagctaagcgtattacgatgactggagctgttagtggtatacaagcacgtgaaatacgtaatgtaccgactagtagcttgcagaatgcattaaccggaaaattaccgggcttttttagccaacagcaatccggacagccgggcaaagatgcttctgatttctttattcgtggtgtgagttcattgaataatgatggtaataagccattgattatagtggacgatgttcagtatacgtatgaacagttgtctcaaatcaatgtgaatgaaatcgaaagtatatctatcttgaaagatgcttctacaacggctatctatggtattaagggagctaatggagtattggtggtgaagacccgaagaggagaacagggtaagcctcaaatcaatgtacgtttagaaggtggtatgcagattccagtacgtactccaaaatttttggactcatacaatacggccattttggtgaatgaagcatacgagaatgatgggatgcccagactattctcaaaagcagatgtgatggctttcagggatcatacagatccttatggccatccggatgtaaattggtatgatgagatttttaagaaaagtgcttttcaggaaaatgtaaatgtggatgtttccggtggttctaaaaggttgaaatattttgtttctgctggttactttacgcaagatggtatggtgaaagactttgggacgaaggatagtggagtgaattctaattatttttaccgtcgtttcaattatcgtactaatattgactttgctgtgacggataatttgagtatgcgtttggatatatcatcgcgttttatgaatatcaatgagccttgtaatatgaatgcgacaggtgaaatttatgatttttcaaaaatgcatccttattcagctccggtattaaatccgaatggttcttatgcttatttgaatgatacggaaggatatagaccaacattgaatgctcgtttagcaaatgaaggatataagcgtacccgtcgtaatgataataatattctatatggagctacttggaaaatggattttctgacaccgggactttctgctaattatcgcttggcatattcgagtgtagacgaaaatcatcgtcaggcaaaccgatctcaatatcctacttatcattatgattcgtcaactaatggatatgtaattaatcctaataaagtatatgagtatggaacgttttctgtgactagtggtacggaaaaggctacaaaagacttgaatattcaagcttcggtgaattatgcacgcgtatttaatggaggagatcatgatgtcagtgctatgtttctgtataatcttcaaactactacagtagacagagatggtcttgtatcagcagctgttcccaacaattttgaaggatataccttaacaatgggttataagtataaaagtaaatatttgatagatctcaatatggcctataacggaaccgaccgtttcggaaggagtaatcgtttcggattttttccagctgtaggtattggttatgctatttcagaagaagacttctttaaaaatgtagattggctggcagataaaatacaacttttgaaagttagagcttcttacggtcttgttggttcggatgtggcagcgggcaatcgttatttgtatgatcaggtatatcagaagggtgatggttactcttttggcgattatccaaaacttactgactcgtataaggaaggtgatttgggaactcctaatgctacttgggaaaaggcgaagaaatttgatgttggtttggatatgaactttttaaataaattttcatttactattgactactttttagataagcgctatgaccagttagtgacgagagaatacattccattagttattggtatcggtttttctccaaataatatagcaaggacaactaatcaaggtttcgatggtcagattagctatcaagatcgattcggtgattttgatttcaatacaaacttggtattctcttatgcaaagaatagggtcgattataaagccgaagctcaacaaaaatatccatggttggctgcgaccggaaagtctttaaatcagccctttggttataaatggattgggtactatactccagaagatgttgcgaagatacgggccggtgcttcagatgctccagcagctccctatacagatattcctgtacaagctggtgatttgaaatatgccgatctgaataatgatggaacgattgatgattatgataaaagtgctattggtaagcccaatttgccttctacaactttgggatggtcgtttggtggatattggcgaggatttagcttcaatgtattatttcagggctcattcgattatagctttgctattaatggtacaggtattgaatcatttaagagtcagtttcagcctattcatactagccgttggacattggaacgctatcaaaatggtgaagaaattggtttcccgcgcttgacgactaatccttctacaattaatagtgccagtacttatatgtctgatttctggttgattaatgcttggtatattcgtttgaaaactgtcgatttgggatatcagcttccaaagaagatattgccgaaagctatcgataatattcgtttctatgtaaatgcttacaatttgttaacatttacaggttatgataagtatcagcaagacccggaaataaaaacaaatacggctggtgatgcatacatgaatcaacgtgttgtgaatttaggtgtacaattgacattctaattactaaaagatatagttatgaataaatataaagttggaaagttcttattacttcctttgttgtgtggaacaattgaagcttgtgacaaatttgaagcctttcctttggaatacgagaataccccgcaggatgatgcagtagaaaatgtattaaataatataaatccggcatgggaattagaactgttggaacgtaatgattatgtggtagcttttaaagataagaaatatgacaagttgtttactcgtactttaggatggaatggaggtgatggagtgttgacgacgcagttgcctgatggaaataccttttggtcatttaatgatagttggtatggagtagtagatggggaaactcggtcacgtgatggaaacaaggtgaacttccctcgtaacacgattatggtacaaacgccaggtgataaagaagaaaatcttgtttggttagctgattttatccagactactgatccgaatgctccacgctattatcaggcacgtactcatattcgtcatccgaaggcgtccaaaacagatgaacagattcaggaaggagatattgatcaaaattggttatattgggcgggtgatgctactgtttataataatcaattacaggttctttggaatggagtagataatactgatgaagaacatcaaatgaggcacgagggtatttgcctggctacttatagtttagaagggaagccgggtgatgaaaactatatgaaactcattagtgtgaatcatcattttaatgatgctgatatttatggatatggctctactttatatgaagatgaagacggacatatttatttatatggtacgtatgataattataatattatagttgcacgtacagctacacatagtttagatagcccatgggaatattatgtatgcaatgaagaaggagaatattcttggcaaaatgcttatccgacgcaggaacaagttgctctttccaaaattcaagaaactgattgtagtatgccttgggtttttaagaaaggagatagctattatatggtagcacaagctaaatggtttgggcgtgaaatgtatattttccggagtgataagccttatggaccttttacagatcgtaaaaccttattcggacttccaaatactttggataaattgggtgtgcagacttatggtaatttatatatggtgaatttacatcctcatttatcacgagaaggtgaattagtattttctactaatacagacccagctgatggctttggaggaaattttaatgcagtaggtagtgcggatttttatcgtccatacttctaccgtgtatataattgggaaatgctttttaaagaataaatctgataggcattaatttcattcatttaagaggatcatttctaagctttataaacaggaaatgatcctcttaaatattattgaaagagatattcccgggtactcacaggctagctaatcgggaaatctaaataatagatattagtggtaaatgtccttttattcgttcttataataaatattttgtaaattgataaaagtatacttaggaatgaataagttgtatatgttttcattattctggtcattatgtgtgactagtttatcagcgcaggtgaacttgcctccgatattctcggataacatggtgttgcagcaacaaacacaagctcctatatggggtgagtctaaacccgataaggaaatagtaatcactacttcatgggatcagaagaaatatacagttcaggctgatgcgcgaggtaagtggaatacaaaagtaaccactccggcagctggaggaccttatgatattataatttccgatgggaaaaaagtgaaactttctaatgtgatgatcggagaggtatgggtatgttccggccaatccaatatggaaatgcaggtagaaggttggggtaaagtgatgaactatcagcaagaaaaagaggaggcggacaattatccgaatattcgtttcttattggtagagaaagcaacaagtccattaccaataaatgacattaaagcagcaggaaatggttggcaggtttgttcatcaaaaagtgtagcagacttttcggcagccggttattttttcggacgtgatttacataagtatcagaatgtgccaatcggcttgatagatacttcttggggaggtacctatattgagacatggacgagtaaagaggctttagcaacaatgccggatatgcagaagaaacttgatgttttgaaagaacttccgatttcatccgaagatcgtgaaaagaaatttcattcagatgtggaagattggaaaaaggagattgaaaagattgataaaggatttgtggatggcagagccatatggacagttacagactttgaagacagtgcatggaaaacaatgagagtgcctggtttgatgcaagagcaaggtttgaaaggatttaatggtatcgtttggttcagaaaaacaatagatattccggcgaaatgggagggcaaagaactgacgttgaatgtcggagtaattgatgataatgattttacctatttcaatggcgtgcaagtaggacacaccgagggatggatgtcccctagaagctataagatacccaaagagttggtgaaaagtggtaaagcagtgattgctgtgcgtgttatggatacaggaggtacgggtggtataaatggaagtcctgaaagtatttcacttcatcgttcccaattggatgccataccattggccggtgattggaagtatcaaatttctttgaatattaaggatattccacagatgcctgttaatacagccaatgaaccgaatattcctggcttcttatttaatgcgatgctgaatccgttgattccttatagtataaaaggggcgatttggtatcaaggagaagctaacacaggacaggcatatcaatatcgtgaattgatgccattaatgataaaagactggcgggatcgttggggatatgactttccattttacatggtgcaactggcaagtttcacagctcaacagacagctccagtggatgcaacttgggctgaattgcgagaagctcaaacacgaacattgcatcttgcaaatacaggaatggctgtgacaattgatataggtgatgcttttgatattcatccgaaaaataagcaggaagtcggcagacgtttggcattggctgcgcgggcacagacttatggtgagaaaataccatattccggtccaatgtatgatacgtatcagatggaaggtaataagatccgtatttatttcaaacatacagatggtgggttgaagactgcaaataacgaagtaataaagggatttaccattgccggtgttgatcataaatttcattgggctgatgctgtgattgagggtaataccatcgttgtatcttcaccggaagttgctttcccgatagctgttagatacgcatgggctgataatccgatctgtaatttgtataatggagccaatcttccggcatctccattccgtacggatgattggccgggaatcactttcgacaataaatgattcattcaatctatttatcagtaaaaatagtacgttacacattaaagaataaccatgagaaaactaatttatctagtaatctttctttttatttcgacaggaatatatgcccaaatgaaagaccttgtgcaatatgtcaatacactgcaaggtaccgactctcatttcggattaagttatggaaatacataccctactaccggtatgccttatgccatgcatacgtggtctgcccaaacagggaaaaatggagaaggctggaaatatcaatatgcagtagataatattagaggattctgccagtcacatcaatgtagcccgtggatgagtgattatgcggtgtattcctttatgccgatggtagggaagttagtcgttaatcaggagatgcgggcaacgaagttcagccatgataatgaaattgccaagccgcattattataaagtgatgctggataatggaattacaaccgagatggctccaactactcgtggtgtacatttacgcttttcttatccctctaccgaagacgcctatctggtaattgacggatatacagatatgagtgaaatcaagattgatccggttaagagacaaatttccggttgggtgaataaccaacgttttgtaaataactctaagacattccgtagttactttgtagtgcagttcgataaagcatttgaggattacggtatgtgggaaaatcagaaagatgagattttccctaaaaagttggaaggagaaggcaaaggctatggtgcttatatcaaatttaagaaaggatcgaaagtacaggcaaaggctgcttcttcctatatcagcgcagagcaggctgtgattacactgaacgacgaactgggtaaagataagaatttggaagccaccaaaatacgtggacataaaacgtggaatgaattattgaaccgaatccaggtagaaggtggaacagacgaacaaatgaaaactttctactcctgcctgttccgtgccaatctcttttcacgcaaattctatgaacgtaaagcaaacggagaaccttattactatagtccttatgacggtaaagtatatgacggatatatgtacaccgataatggattctgggacactttccgttctcaatttccattaactaatattttgcatcctactatgcagggacgttacatgaatgccttgcttgccgcacaagaacaatgcggatggttaccttcctggtcagctcccggagaaacaggaggaatgttgggtaatcattccatttcattactggcagatgcgtgggcaaaagggattcggacttttgatccggagaaagctttgaaagcctacgcacacgaagccatgaataaaggtccttggggaggcgccaacggacgcggtttctggaaagaatattttgaactgggatatgttccttatccggaatcaatgggatcgagtgcacagacaatggaatatgcatacgatgatttctgtggctaccaactggctaaaatgaccggaaacaaacattatcaggaagtctttgcccgtcagatgtataattataaaaacgtattcgatccgtctatcggttttatgcgtggaaaaggcgttgatggtaaatggcaggaaccgtttgacccgttggagtggggtggacctttctgcgaaggtaatgcctggcattatacctggtccgtattccatgatgtagaaggattaataaacttgttcggaagcgaccaaagatttacgaccaaaatggattcggtattcacccttcccagcactattaaaccgggaacttacggaggagtgatccatgaaatgaaagaaatggaattggcgggtatgggacaatatgcacacggcaatcagccgattcagcacatgccttatctgtatagctatgccggtcaaccgtggaaaacccagtattgggtacgccagatcgttgaaagattgtataattccacagaaagaggatatccgggagacgaagaccaaggcggtatgtcatcatggtatatcttgagctcattaggcatttatgccgtttgtccgggtacggatgagtatgtaattggcagtccgttatttaagaaagctactataacgatggaaaacggcaataaattcgtgattgaagcgaacaacaatagtaaagagaatctctatatccagtctgctaccttaaatggacgtgtgttggataagaattttatcagatacgacgatatagcagacggaggaatcatccgcttcgaaatggggagtcagccgaataaagaacgatgtacgtcgaagtatgccgctcctttctctttgtcgaaagaataagaaactaaaaagtgtaacgagaatacagtatgaaaaataaagttttaacaggtttattattggttttgattggagggtgggggagtctctcggcgcagagcgccgggagtaattattcccgtcaggtaaataccctgataggaacgaaaggtgtgggtctgacttcgggatatctttatcccggagccacctacccttatggaatggtgcagtttaccccctcttacttttctaaacgttccggattcgtcatcaaccaattgagtggcggcggttgcgaacacatgggcaacttccctacttttccggtaaaaggcaaactgaagatgtctccggacaatattctcaactatcgtatcaatatctctgaagaaaaaggacatgcaggttattatgaggcaatggtgcaggaagacatcaaagctaaactgactgtgaccgaaagaactggtatggcgagttatgaatatccggccgatcagcaatatggtacggtaattatcggtggaggtatttctgctactccgatagagcaggccgccatcgttattactgcaccgaataagtgtgaaggatatgcagaaggcggtaatttctgtggactccgtacaccgtataaagtctattttgtagcagagtttgatacggatgcgttggaatcgggaacatggaaaagaaatgaactgaagccgaacacgacttttgctgaaggagaatactccggagtctattttacttttgatgtaaataagaagaaaaatatccaatataagattggggtttcttatgtatcagtagaaaatgcacgcgagaatctgaaagcggagaataccggatgggatttcctgcagattcagaatcaggcagaatccaaatggaatcattatttgggtaagattgaagtagaaggaaccaatccggatcgtaccactcaattttatacccatctgtatcgttcattcattcacccgaacgtatgtagtgatgtgaatggggaatacatgggagctgatttcaaagtgcataaatcccgttccaagcactatacttcttttagcaactgggatacctatcgtacacagattcaactattgtcaatccttgatcctgaagtagcctctgatattgttatttctcaccaattgtttgccgaagaggctggtggtgctttcccgcgttgggtgatggctaatatagagaccggcgtgatgcaaggagatccgactcctatcctgatatccaatgcttacgcttttggtgcccgcaattatgatccgaaaccaattttcaaaaccatgagaaaaggagcggaagaaccgggagcaatgtcacaggaggttgaggctcgtccgggactgaaacagtatttggataaaggatattacaacgcttctatacaactagaatatacttccgctgattttgcaatcgcacaatttgccttacatgccgtaggagatgagtttgcaagctggcgttatttccatttcgcacgttcatggaagaatctgtataacccggaaaccggatggttgcaatcacgtaatccggatggttcgtggaaaccactgactgaagatttccgtgaatcgacctataagaattatttctggatggtgccatacgacattgccggactgatagaaattatcggaggcaaagcagcggcagaaaaacgcctggatgaattctttactcgtctggatgccggctataatgatgcctggttcgcttccggcaatgaaccgagttttcacattccttggatatacaactgggttggaactccctataaagcacaggagattattaaccgtgtattgaatgaacagtattcaagtaaaattgatggtctgccgggcaatgatgatttagggacgatgggcgcctggtatgtgttcgcttgtatcggtctttatcccgaaataccgggagtgggaggctttacggtgaacactccgatattctcatccgtgaaagttcatttgaagaaaggggatatggtgataaaaggcggttcggaaaagaatatttatatcaagtccatgaagctaaacggtaaaccgtatgacagtacatggatcgattgggatcaactgaataatggggctacgatagaatacactacctcgtccaagcctgacgtgaagtggggaactaaagtgacacctccctcttttccttaaagcaaattaacgaggcatataagtttatatcataaatttaggcacggattacacggattaacgctgttgttctatatattcatcactctaaaaaccgtgaaatccgtgtaatccgtgcctcctaaccatctaagattattttgtaaaagtacttatttataatatcaaacgtgaaaatgaaaagaaagctacaaaacatagcttatctactggtggctgccgcattagtcacttcctgtggcgggaagaagcagacatctgaattcccggattgggcatgggcagatttccagcgtccggaaggtattaatccgattatttctcctgacactacaacctttttctattgtccgatgagacaggattcagtagcatgggaagcgagtgatacgtttaatccggctgccactgtttataatggaaaagtagtagtcctctaccgggctgaagataactcggcaaccggtatcggatcacgtacctcccgtttgggatatgcctcttctgacgacggactacacttcaaacgaatgtccgtacctgtattttatccggcagacgatagtcagaaagaactggaaaatcccggcggttgcgaagacccacgtgttgctgtaacagaagacgggctttacgtaatgcattacacacaatggaaccgcaaacaggcacgtttggcagtggccacctcgcgtgatcttcaaacgtgggaaaaacatggaccggctttcgcaaaagcatacaacggaagattcatagatgaattttccaaatctgcctctatcgtaaccaaattaattgacggcaaacaagtgattgccaagattgacggcaaatactggatgtactggggagaaaagtttgtgaatgtagccacttccacggaccttgtcaactgggaaccgatgttggatgaaaatggagaattcctgaaagtgatgactccccgcgcaggtaagttcgacagtgacctgaccgaatgtggtcctcctgccatcctgactgacaaaggaatccttttattttataacggcaaaaataaatcgggcgcagaaggagacacactgtatacagccaactcttattgcgccggacaagccttatttgatgccaaagatcctactaaactaatcgatcgcttggataagcctttctatattcccgaatcagactttgaaaagagcggacaatatccagccggaaccgtatttatagaaggacttgtattctacaatcagaaatggttcttatattatggctgtgccgattcacgcgtggcagttgccgtatatgatcctctcaaaaaataaagaaaacgttcataatgaaaataacagtttataaaatagaaattaagacatgaaaaaactttttgtattgattgcagcggcttgtatgacatgtactgctgcgtttgcacaaactgtgaaaccttttaaggagggtgagagagcagtgtttctgggaaatagtataacggatggtgggcattaccattcatacatctggttatactatatgacccgttttccggatatgcctatccgtgttttcaacggtggtattggtggagacacggcctatgatatgaacaaacgcctggatggtgatatttttgcgatgaaaccttccgtgttgatggttacttttggtatgaatgattccggatattttgaatataacggtgataagcccaaagaattcggtgagcagaaatatcaggaaagtataaagaattacctgcagatggagaagcgttttaaagatcttcctgatacccgtatcgtgatggtcggaacttctccgtatgatgaaaccgtacaactgaaagagaatacaccgttcaagacaaaaaatgaaaccatcaaacggcttgttgaatatcagaaagaatcggcagctaagaataattgggaatttaccgatttaaatgctcctatgacagctattaatcagcaatatcagcagaaagatcctacctttaccctttgtggcagtgaccgtattcatcccgataacgacggacacatggtaatggcctatcttttcctgaaagcccagggatttgtaggtaaagaagtagcggatatggagattaatgctaataaaaaacaagtcgttaagtcggaaaattgtaccgtttcaaatataaagaagaacggaaaagatttgagttttgactatttggcagaagctcttccttatcctttagatactattgcccgtggttggggacagaaaaagagccaggcagaagtgctgaaagttgttccttttatggaagagatgaaccgtgaaacgttgaaagtaacaggactgaaaggcaattataagttgttgatagacgatgaagaaattggaatctggagtggagatgaactggcaaagggcattaatcttgctgctgaatccaaaactccccaataccaacaagcattgacggtgatgcacttgaatgaatatcgttgggaaattgaaagaacattcagagaatatgcgtggtgtgaattcggctttttccagcaaaagggattgttgtatgctgacgacagaaaagcgatcgaggtgatggatgaaaacttggataaaaacgtttggttgaagggacgtcgtgatatgtattcaaagatgatgtttgaagctgtccgtgatgctcgccaacaggaaatggatgttcttatcaataaaatttatgaaataaataagcctgttgtaagaaagattttacttagaaaggtctgatgtgataacagcgtagaaatacgatagaatactcaccgtaatgagaaagaattctcactataatgagaactttttctcattgcgatgagtattttttctcattacagtgagtatcgttgagaatatatgaatagataagtactctttgtaatagcttgataatgtactccttattgtagcttttgcattaaacagactacctttattgaattcttaattctttttccagaaatcggaagtgaaaagcaataatactgtaaacaattccaagcgtcccaagagcattaagaaagaaagcagccatttggcagcatcaggcaatgcactccatgagaaagccggaccacatgtgccgaggcctggtcccatattacctatgcttgagattacggttcctattgattccagaaaaccgactcctaagcccatcatgacaagtacactgatgataacaatgaccacatacaaaaaggtgaaagccaatacagtagactgaatggaaggagaaataacttgcttatttacccgcaccgggagtatggcgttagggtgaagaatatgtttgaattcatttttcactacttgaaacaggataaccatacgaatacacttgatacctcctgttgtactgccggcacaagctccgataatcatcacaatgatgagacagccccagaggatagaaggccagagcatatagtcagctgtgacgaatcccgtagaagtttgcaatgaaaccacttggaaaagcgatttccggaatgcctcctctactcccatagaagaagtctgatggagccagatagcaatgaatagagtgaagaatgaaacacaaataaagtagaacttcagttccgcatcatgtaggaacttcttaattttcccattaaacatcaacagtagcaatgtgaagttaattcctgaaaggaacatgaaaatggaaattacatagtctatataaggtgaatggtaatattcaatgctggcctgtttagtagagaacccaccggtactggtcgttgcaaaagcatgacatatactatcgaatatgctcatgccaccacctattaataaaataatcagtgttcccgtcattccggcataaataccccaaatccatttagcagtgatgccaatgcggggatgcactttatcatgagtaggtccgctggcttctgctgcgaacacctgaattccgcccacaccaaaaatcggcagaacagcaatggtgaagaatacaatacccaaaccacctatccattgcgtcatagcgcgccagaaaagtattccgtggggcatcgactctatattattcagaatagtggcacctgtactgctaaatccggacatcgtttcaaaaaatgcatccgcaacattgggaatatatcctcctatataataaggtaacattccgaaaagggaaaaggtaacccatgctgcgctgacgatgacatatccatcacggcgattcaaggatttcacagcgtctttcccgatggcaagcagcagaaagccaatacaggctgtgacagcagatgaaatcaggaaactctgcaagtcattctctttataaaaaagagagaccgctccacaacataacagcatcgctgtttctatcagaagcagaaagcccagaatccggaatatcatctttgaattaatcataaattggtttagttatcttatgcttaattaaagaacttctcaatctttttaatcatcatactcagacagaatacgactacatggtcgccgggacggatttgtgtatcacccgtcaccaagataccttctccgttgcggatcattcctccgatggtagttcccttcgggagtcccaggtctttaatcaggtgtttggtgatttttgcaccttccggtacagtgaattctgcaacgtccgcattggcaaaagtcaggcatttcacattagacacgtcggcgtccagcatcatttggtagatatggctggcagcaatcatttttttattgataaccgtgccgatgtcgagactctctgccataccgatatagtcgatgttttccacttctgccaccgtcttttccactcccatacgtttggcggcgagacaggcaaggatattcgtttccgagttgccggtcagggctacaaatgcttcggtattctttagcccttcctcgataagcagatccatgtcgcgaccgtctccgttgataatcattgttttgtcatccagtagctctgtcagacggttgcaacggttcagatcattatccactattttcacctgcatatagtccggcacatattgtgcggtacggactgcgatacggctacctcccataatcattacattgcgtacatcggcatagtcttctttgccggctatcttacgtatataaggaatgtacttgcgggtagtggtgaaataaacaatatcatgcaatttaataacatcgtctccgcgagggataatcgtttccgttccgcgtttgatggccactacgtggtaaggaatgttgggaccgcctaattggtgcagcggtatattcaggatttcagccttttcgcgcatcttcgtaccaatcagaaccagcgaacctccgcagaactcccaccattggcgtacccagctcatgcgcatggaagatacgatttctttagcagccagcatttccgggtaaatcagagaatctactcccagcttctggaaaaactctttatttttgggtagaagatattcatagttgtcgatacgcgccactgtctttttggctcccaggttggtagccagcatacaggcagtcatgttgcggctttcgtccggtgtgactgcgatgaacaggtcggcttctttgacgcccacttctttcaatccggagatggaagaaggagaagcggcaacagtcagcaagtcaaagttggcgctaagagcacttagtttctcttcgtcatcatccatcaagataatatcttgcttctcgcgcgataacagtttggccaaatgggtgcctacgttgccggcaccggcaataataatcttcatgtcaattgataaattcttttattttagtcagaatcccttcttcatccatgccgcacagttggtataattcggcaactgccccatgttctacaaatatattaggaataccgatacgctttacggtcggtttgtattcgttgtctgccataaattcgaggacagcgctacccataccgcctttgataattccgtcttcgatggtcaggatacgttggaatttacgtcctgcctcatgcaacaactcttcatccagtggtttcaggaatcgtaaatcgtaatgggcgatggacagacctaaatctgcttctgcccgggtgatggcacgggcggctacatttcctatcggtccgatagtaatcactgcaaggtcgctaccctctttcagtttccgtccttttcctaccggaatttcttccagcggacatttccagtccaccagtacgccgcgtccacgggggtagcggatcacgaacggtcccttgtccggcaattgtgccgtatacatcaggcgacgtaattcatgttcgtccatgggggaactgatagtcagattagggatcgggcgtaaacatgccatatcaaaagctccgtgatgagtgggaccgtcttcgccaaccagtccggcgcggtcgagacacaaaacaacaggaagattctgaatcgctacgtcgtggatgatattatcatgcgcccgttgcataaaagaagaatagatattgcagaacggttgcagtccgtctttagccatccctccggagaaggtaaccgcatgtccttcggcaataccgacatcgaaagcgcgtttcggcattttctccatcagtatattcatcgaacagccgctgggcatggcgggagtgacaccgacaatcttcgggttagcttcggcaagttccaccagtgtatttccgaatacatcctggaaaagcggaggcattccttcagtgttggcaatgaaacgttcgccggtgaccggatcgaatttgccgggagcatgccattcggtagcgtgtttctccgccggaccgaatccttttcctttgatagtatgtagatgcaggattttaggtccttgcatatctttgatatcacgtaatactcttgccaggttctttacgtcgtgtccgtctatcggaccgaagtaacggatattcatcccttcgaaaatattctgttgctgtgcagccattgatttcaggctgttcccgaaacgtatgagcgctttgcgacgttcttcgtttaaaatgccaagcttgaacagcatgcgcgagagcttgaaacgcagctgattatagcggttggaagtcgttaagttgaaaagatactgcttcatgcctcctacgctgcggtcgattgccatatcattgtcattcaggataatgagcaggttgttcgacgtggcagatgcgttgttcagtccttcaaaagccagtccgccactcattgatccgtcgccgataatggctactacatgacgtttggcatctcctttccgggcggctgcgacagccataccgagagcggcagaaatagaattggaagcgtgtccgcacgtgaaagtatcatattcgctttcttccggagatgggaaagggcggattccaccgagttttctgttcgtagaaaatgcttcacggcgtcctgtcagaattttgtggccgtatgcctgatgtcccacgtcccatacgatacggtcgtatggtgtattgtaaacgtagtgcagggctacggttagttccacggttcccaggctggcggcgaagtgtccggggttgcagcagagttctttaataatgtcttgccttagttcaccgcatacttccggcagttgctctacggttagtttacgtaggtcttcggggtaattgatggagtttagcaagttatatgttggttcactattcatgattctaggaaatttagtgcaaaaatacgaaaagaaagtatattcgacctccttttttttataaaatcttatccggtataaagacgtatctgtttttctatgcttcctaagattattgaatcgtgaggaaaaagagggcggaaatagttttttgattacttttgcacatgaaacgtaatgaaatgatggaaaatcgtatgaactttcaaacatctgtagaattacctgccgggatgccgtcggttagtcatgcagatcatattcttctgatggggtcctgttttgcggaaaatatcgggcgacaattaatggatgccggatttcaactggacctgaatccttttggtattctttataatcctttatccgtctcatctgctttgagggagattataaggaataaggaatacaacaaacaagatctgtttgcctacaaagatttatggcatagcccgatgcatcatggctctttttctgcttttacgcccgaagagacattgaataccataaattcacgtcttcatcacgcttataagaaactgccggaattgaactggctgatagtgacaatggggactgcttacgtttataaacaaaaggagagtggacaagtggtagctaattgccatcaattgccggagagtcattttttgcgttaccggctgtctgttgaagaaattgtagaagattatacagcactcatcaccgaaatgtcagcccggaatccggaactaaaatggttgtttacagtcagcccgatccgtcatatacgcgacgggatgcacgccaaccagttaagcaaatcgactctgctgctcgccatcgaccgattgcaacaactgtttccggaacgagtgttctatttcccctcttatgaaatcatattggacgaattacgtgattatcgcttctatgccgacgacatgttgcatccgtctcctctggcgattcgttacctgtgggaacgcttctccgaaaccttcttttctcctgaaacaaagcaagttatcgtagctgtgcaagacatccgccgggacttggcacacaaaccctttcatcccgagtcagaagcgtatcaacgctttttaggacaaatagtgttaaaaatagaacgacttatcggaaaatacccgtacttagattttcaaaaagaaacagaactatgtcatatgcgattgaatccatagccaaaagtatcggtgcccgccgtgtgggcaaacataaagcgactattgattggctgctaacagacagccgctctttgagttttccggaagaaactcttttttttgctttaactaccaaacgaaatagcggagcccgttatatccccgatttatatgaccggggcgtacgtaattttgtaattacggaagaagactttaaagaagttgagaatggagagttgagagttgagagttctctcaacttcctcatcgttcccaatcctctgaaagctttgcagaagcttgccgaaacacatcgtgataaatttaaaatccctgtgatcggtatcaccggcagtaatggaaaaaccattgtgaaggagtggttgcatcagttacttagcccggatcgatgcatcgttcgttctccacgcagttataattcgcagatcggagtcccactttctgtgtggcaactttctgaagaagccgaactgggtattttcgaagccggcatttccgagatgggggagatgggagctttgaagcgaatgattaagcctaccattggtattctgaccaatatcggtggtgcccatcaggaaaactttttctccttgcaggagaaatgcatggaaaagctgacgcttttcaaagactgtgatgtcgtgatttacaacggtgataacgagttaatcagcaattgtgtcgcaaaatcaatgctgacggcacgtgagattgcctggagccgtaccgacattgaacgcccgttgtatatcagccgtgtgaccaagaaagaagatcataccgttatatcttatcgttatctggagatggataatactttctgtatccctttcatcgatgacgcttccattgaaaatgcactgaattgtctggcagcttgtctttacctgatgacacctgccgaccagataaccgagcggatggcccgtctcgaaccgattgccatgcgtctggaggtgaaagaaggaaagaataactgtgtactgattaatgatagctataattcagacttggcatcattggatattgctctcgatttccttgtacgccgttcggaaaagaaaggcttgaaacggacgcttatcctgtcggatatactggaaaccggacaaagtaccgctacgctttatcggcgtgtggcacaattggtgcagagtaaaggtattaataaactgattggagtagggcaggagatatcttcttgttccgcccgttttgatgatgatctcgaacgctacttcttccctaatacagaagcactccttgcatccaatatacttaaatcgcttcattcggaagtgattctggtgaaaggttcccgcgtgttcaactttgatttggtatccgaagccctcgaattgaaggtacatgaaaccattcttgaagtaaatctcggagcgatggtagccaacttgaaccattaccgttctatgcttcgccatccggaaacaaagatgatctgtatggtgaaagcatcagcttacggagccggttcgtatgaaatagccaagagtttacaggaacaccatgtcgattatctggccgtagccgttgctgatgaaggttccgaactccgcaaggcaggcattaccgcctctattatcattatggacccggaacttaccgcattcaaaaccatgtttgattataaactggaaccggaagtctataatttccatctgctcgacgcacttatcaaagctgcggagaaagaaggaatcaccaacttccccattcatgtgaaacttgatacaggtatgcaccgtttgggctttgcggtagaggatattccattgcttatccgtcgactgaagaatcagagcgcggtgattccccgttcggtattctctcattttgtaggaagtgattcgtcacagttcgacgctttcacccgcggacagattgaattgtttgagaaaggttcgcaagaattgcaggccgccttctctcataaaattctccgtcatatctgtaatacggcaggaatcgagcgttttcccgaagcacagtacgatatggtgcgcttgggaatcggactttatggagtcagcccgatagacaattcgataatacataatgtaagtacgctcaaaactactattcttcagatccgggatgttcctcaagaagatacagtcggatatagtcggatggggcatttggtacgtccttcacgcattgcagctattcctatcggttatgcggatggactgaaccgccacttgggacgcggcaacgcctattgcctggtgaacggaaagaaagctccttatgtggggaatatctgtatggacgtttgcatgatcgatgtgacggatattgattgtcgggaaggcgatcaagctatcatcttcggtgatgatctgccgattacggtgttgtccgataagctggaaacgatcccttatgaagtgttgacaagtatatcgacacgggtgaaacgggtatattatcaggattaattcaccacagattacacggattcacacagattgaagagaatatatagtagaaataaatcgaaagataagctataaatctgtgtgaatccgtgtaatctgtggtgaaaatgattatatttgcagcaactattaaaaacctcttatatcaaataaacttatgacaaacttattattgttaggctttttgcccagtggttccgaatggattattatcgctttggttatccttcttctttttggtggaaagaaaattcctgaactgatgcgcggattaggcaaaggcgtaaagagcttcaaagacggtgtgaacgaagcgaaagaagaaataaacaaggcaaaagacgagttggacaaacctgtagatccttctaagaactaaaagagcacaacatacggatggcagaaatgaccttttgggatcatttggacgaactgcgtaaggtactttttcgggtagttggagtttggtttgtattggcaataggctattttattgctatgccctacctcttcgaccatgtgatacttgcgccttgccacaatgatttcatattctacgatttattacggcatatcggtaaaacatttgatttgaccgatgacttcttcacgcaacaattttatgtgaagctggtcaatatcaacttggctgctcctttctttattcacatgtcgacagcattctggatgtcggtggtgacggctatgccttatatcttttttgaaatatggcgtttcatcaatcccgccctttatccgaatgagagaaagggcgtgcgtaaagcattgactatcggaacactaatgttcttcatcggtgtactgttgggctactttatggtttatccgttgactctccgtttcctttctacttatcagttgagttcggaagtggagaatatcctgtcgctcaattcttatatcgacaattttatgatgctgattctctgcatgggattggcttttgaacttccattggttacatggttgctttctttaatgggagtggtcaacaagtccttcctgcggaaataccgccgtcatgcggttgtcatcatagtgatagctgctgctattattactccaacgggcgacccgttcaccttgagtgttgtcgctattccgctttatctgttgtacgagatgagtattttgatgataaaggacaagaagaaaacagaagaggaagttgaagatgaagctggagatgaagttgccctgtccgaagagtgaagcgatagaatcttatgaaatccttttagcagtttgccgggcggaagatgcttatcttgccgtaggatataagcaaatgcgcgacttgctggagcgtatttgtcgcgcgcaaatgcaaaacgaaagcttacagatgaccgacctttccgcacgaatcagtttcgtggcggctaaggtcggtctctctgttgcagagcagaaccggctgcatactttccggctcacttcgaatgctatcttgaaccgccagcaggagcccaaccgggaacaactcttgcgcgatgcgaaaacattagctttctttattcgtaaacttctggaagaggatattcccttggaactataccggctacttccgcgtgcggatgctacctacctagttgcgcctcctgcccgcgaacgagtgcagcgaatgcgtgtctgcttccagtatgccgacgagcaatatttgtatgtaactcccttggatgaagtctcggagaaaccgtatttagttcgttataatatccctcaaatcaatgaagagtttgcagaaacgtgcaaactgctttggcgtcatgcccaggtcaatttattggatgttgcagtggatgaggcgggaatcctgactccttctttcattgtactcgaaccggattatttacttgacatcagttctttggcagagtgcttccgtgattacgggcatcatccggccaattattttctttcccgtcttcaaccgatcgaaaatgcccggcctctgttactgggaaatatagccaatctttttctggacgaatggattcatgcgaagagtgaagacatagattatcgtacctgtatgcagaaagccttccggcgttatcctattgaactggctgcctgttccgatttgcgcgacaaagagaaagagcgccaattctttgaggactgcaaactgcacttcgatcatattcgtgaaacggtcaatgatacctttcatgcagccggttatgaactggacaagacagatgccgtgctcgaaccgtcttatatctgtgaagcactcggacttcagggacgtctcgactatatgcagcgggatatgtcttctttcatagaaatgaaatccggcaaggcggatgaatacgctatccggggcaaggtagagccgaaggagaataataaagtacagatgttactttatcaagcagtcttgcaatattcaatgggaatggatcaccggaaagtgaaagcctatttgctttatacccgttatccgcttctttatccctcccgtccttcgtgggcgatggtacgtcgggtgattgatttgcgtaaccgcattgtggccgatgaatatggcgtccaattacgcaacagtctggaatatacggcacaaaaactggaagaaatcaatgcttccaccttgaatgaaagaggattgaaaggacgtttttgggaaacatacctgcgtccttctattgataactttcaatcgaagctgaaagctctttccgcattggaaaagaattacttctatgcggtgtacaactttataacaaaggaactttatacctcaaaatccggtgacgtggattatgagggacgtacaggggcagcttctttgtggctctctacattggcggagaaatgtgaggctggagaaatcatttatgatctgaaaataaaggagaaccatgccgccgatgaatataaagccggacttactcttaccgctggaagtgagatgcttcatgctgaaactttccttcctaatttccgtcaaggcgacgccattatcctttatgaacgaaactgtgatacagataatgtcaccaataaaatggttttcaaaggcaatatcgagtatctgacagaaaacgaaataggtatccgcttgcgtgctacccagcagaatccatccgtacttccggccgaaagcctttatgccatagagcatgatacaatggatacgacattccgctcgatgtatcagggattatatgcttatctttctgcaagaaaagaacgtcgtgacttgttgctgtcacaacgtcctccgaggtttgataaatcattggattccatgattttctgttcggaagacgattttacgcgagtcgccctgaaggcaaaagccgcacaggactatttccttcttattggacctccgggaacaggcaagacttcatgtgccttgaagaaaatggtagagactttccatgcagacaaggatgcgcagattcttttgctttcctataccaaccgggcggttgatgagatatgcaagtcgttggcttccattgctccggcagttgactttatccgggtaggaagtgaattgtcatgtgatgaagcctaccgcgggcatctgattgaaaatgaattatcctcttgcaaccgtcgttcggaagtttacgagcgtattcggaattgtcggattattgtgggaacggtagcggctatttccggtaagccggaactgtttcgcttgaaacattttgatgtagctattattgatgaggctacccaaatcctggaaccgcagttgttaggaatcctctgtgcacgtggagaagatgaaaaagatgcaatagataagtttgtattgatcggagatcataagcaactgcctgctgttgtgcagcaaaacgcggaacaggcggcaatctatgatgaatcattactgtctatcggattgagcaatctgaaagattctttgttcgaacgtctttatcggaactgtacggcagcctgttcatcgtctgctattcatcgttcctatgatatgctttgtcgtcagggacgcatgcatccggaagttgccttatttgccaatcgtgctttttacggggggcggctgattcctgtcggactacctcatcaaatagaggactcggacacgatctgccgtttagccttttatccgtctgtgccggagaaagcaggagcatctgccaaaatcaactattcggaagcacgtatcgttgcggatttagccgttcgcatttatgaacaccatcagtcggattttgacgaatcccgtactttaggaatcattactccttaccggagtcagatagcattgattaaaaaagaaatagaatcagtaggtattccggttttgaatcgcattctggttgacacggtggagcggttccagggaagcgagcgtgatgtaataatctattccttctgtgtcaactacccttatcaattaaaatttctatccaatctgacagaagaagagggtgttttgattgaccggaaactgaatgttgccttgacccgtgcaaggaaacagatgttcatcacgggagttcccgaactcttggaacgcaatcctctctataaaagtttattaaaattaatagaaggctcctgaaaaattgcatcatttttgcagatgttagtttttattctctctttatgcaattcattaacacctctatattgaacaaacgcctatatttgcaacacgtttttttcatagagatttagatttaaggttagaagaattgtggaagtcgtgagacttccctttttttcatcttaacgtttactatacttcattataggaatgcaaaacactgttttttagtgttacgtttaaaaaaattgcaggaggatgatgcaggataagtaaacctaaaaagccttcttcgtgagaagaggcttttttatttttcattttttgaataattggttaaaaacaaaagagtaatccggcgacggattactcttttgtttttattgatagtatctattgaaatggaattaatccaatacgataggtttgtatttcggaactaatgccttcatgatgacccaaccaagcagataagctactgcacacacgcagaaaattatgaaatatccggcaggtttaccttcgaagcccatgaatgtcatggcagggtgtacgaattgtgctccttgttcgagcaattctttcgtcatttccacctctttgccgtcaaccattgttgttccggaagcatatacgaacaagttacctgccactttctgaagaatcatagaacctacgcctcctgccataccaccgataccggtaatacttgcaatagccgttcttgggaacatatcacctacagtagagaagatgttagctgaccaggattgatgagcagcaccaccgataccgattaaaataaccgggaaccatggagaaaccgtacctaacggctgtgccaacaatacaaccaatgggaagaaggcgaagatcaacatcgctttcatacgggctgcataaggattcatacccgttctgttgatgaagatggtaggtaatttaccaccatagatggataacatggttaccgcataaagcgtaaagattaatgccatacccaacgggtcggaggttttgatgccgaattgagtattcagataagacggagtccagaaaaggaagaaccaccatacgccgtcagtcatgaacttaccgaagacaaaggcccatgtttgtttgtagctgaaacattgccagaacttcattctcttttcatctttttcgtctgtcattggagcactgcctgcttcgcgattatcttgctcgatgtagtcaagctctgcctgattgacatgtttgcttttcgacggggcatcatacataaacacccagaatcccatccagataaagccaagtccaccaattacgataaatgccatttcccaaccgaacatttttgccagaataggaatggtaagaggagcgatcaatgctccgatagatgcaccggcattgaagatagaagtagcataagcacggtcttttttagggaagtactctgcggttactttaatagcggcagggaagttaccggcttctcctaaagcaaggatacagcgggcggcgaggaagcagtacatactgacagtagcaatagtcactaccacatctcctgtggcaccggccagttctgctgcactatgaagcccaacttgtgcttctgtaacaataccacaaacggcatgaagacaagcacctgccgaccatacaccgatagcccatagaaaaccttttttagttcccatccagtcgacaaaacgaccggcaaacagcatacatatagcgtatacaatggagaaaacagaagtaatagtaccgtagtgagattcgtcccagtggaattccggtttgataaattcatcccacgtcaatgagagaacctgacggtcgagatagttaactgtagtagcaaaaaatagcatagcacagatggtccatctgtagtttgtcatcttttcgcctgttttttgaaatgcattcatgataatggatttaaatagattttgtttcgttgacaaaggtcggtatttcgactgaattttatttgtaaaaattggtcaaaatcatgtattattcgttgcattatatatgctatttgtttcaaaggatataaaaatgtctcatagcattatcatttgcaacgttgggggtaatacagaaagaagataaacgagtttgtgaatcaagagcaaatgagtctaatcttttagacgcagatgacgcggataatgcggattcttatttttgatccgtgctatccgcgttatctgcgtctgaaaaattatatgtcatacaggaatacgcaacggttagcgcatttctgtatatttgatcttgtccatgtctccgtagtcgagattttcacctgccataccccagataaacatgtagttgcttgttccggcagcagcgtggatagaccattccggtgacatgatagcttgttcgttctgcatccatacgacgcgttcttcttgaggttcgcccatgaagtggcagatagcatttccttccggtacattgaagtagaagtatgcttctacacgacgagagtgagtgtgtgccggcatggtgttccatacgctacccggtttcagttcagtcaatcccatttgcagttggcaggggccttcttcaagtacgttgttaacaatcaactggttgataacgcggtcgttgctttcttccagctttccggcagcgaatgagtttgctttcagagaacctttacgtccgtcgatagtaatcaattgagtcttgtattccttgtgggcagtagccgagttgatgtagaatttggcaggattgctggaatctttgctcttgaaagtcactttctgcttgcctctacctacgtacagggcatctttgaatttcagcgtatattctttaccgtctacggttacgataccttcgccaccaatgttgatgacacccagttcgcggcgttcgaggaagaatttagatttcaacgggtcgattgtttcaagtaccaattcttttgttgcaggtactgcgccaccgaagatcagacgatcgtacatagaataagtaacgttgatttcgttcggaaccataactttttccatcaggaagctactgcgcaagcggttagtatcatacgttttcacgtcttgcgggctgcaagccacttgcatcttgtaattcacctgggcggaggcagacattgctgcgatacccaacatcattgcaattgctaattttttcatctttcgagttttttattgagttatatattatatactacttattatcagttaaaggcttttcgacttattccttattactgttcaatgcgttctttgcgtcgtttctagtcatgcggatacggttgtagatagccattccgagtgctagtgctacgaggatggcagggccgataatcttcagactgtaagtcaggtggaagataccccagcagaagagactggaagcaaagtcaagcgcgccgccttcaaaaccggcggggatgtttactgtcgggtcgcctgttgcttcgtatacatctttagcagccagtgtaaagaagcctgccagtcctgttacgaaatacagacctacaatcaatgccaccaggccgataataaatgatttcactacgttaccttttgtaataggcagaatcatcgggaacaggtagaacatacctgccagagaagccagcggtaagaaacggttgcccggaaggataacagccaggaagatagtgacagggatcaacagcagagataccaccagggtagtcgggtgaccgataaccagtgcagggctcataccgatgctcaatccggtgttattcttatatttcttagcgatcagttcgcgggtagcgtcagagatcggtttcaaaccttcgataaaaaggctggtgatacgtggaatcaattccatcaccgcacccatcttgatacccagtcctaaaatgcccggaatattatccaatacttctttccagctggcacaacccaatgcgccgataccgcaaccgattacgatacccaagaacagcggttcacccatcaatccgaatttctttttcataccttcagaatcgatattcagcttgtcgaatcccggaattttatccaatagtttattgattacaatagcaaacggaacgaaactttggcagaacggttgaggaatagagataccgtccattttatcatagaacttctggaaagcaggagcagtcatatcagccattaccagtgtaatgatgtaacagatgatggcagcgaagaatccccaatagatattgtcggaagcaaagtagacgatagcaccgataaatgcgaagtgccaatagttccaaaggtcgatattgacggtacgggttgttttggtaagcaacattaataagttaactcccaagcaaacagggataatgaaagcaccgactgaagtgttgtaagctaccgccgcagcagaaggccaacccatgtcgaaaattcccaattccaatccgtagatttcaaccattttacttaatgccggacccagactgctggtgagcaatgccgtcactactgataaaccaacgaaaccgacaccaaccaacaaaccgctcttcagcgctttgggaagtttaataccgatacatactcctaaaatcgtgaaaatgattggcatcattactgccgctccaagaccgataatgtacttaaatacttcttccattctgttctattttttctctgttttaatgataaattacctgtgtttccccagagggtattagttgtaaaccgtgccaaaagtaagaccttttttgctttcttccaaaatgaaactcttaatttatgagatattgcatcaaaaatggacatttttgacgtttgcgtgcacaaaattagtcgtttccgtgcacgaaaaacaaaaaatgcacctacttgactaaaaaatcccactgggtttagaggaaaaacactactttcgtagcgtgaaaaaagactatgttgaatccttaaaataacaaaccatgagacgaactcctttttataatttttttatagtggctttattggttacaatgaccgcttccgtatcggcacaacaggtagacagcaagcttccctggtctgtacgactgactgaatcggaaatgatccgttaccccgaatcctggcagctcgactttcagccgaaactgaagtgggattattgccacggacttgaactgggagccatgctcgatgtgtacgacgcttatggcgacaagaaaattcgcgattacgccatcgcgtatgcggatacaatggtgcacgaggacggaagcattaccgcttataaattaaccgattacagtcttgaccgtatcaactccggaaaaatccttttccgtatctatgagcagaccaagaatcctaaatataagaaagcactcgacctgctttatagccagtttgaaggacaaccgcgtaatgaggacggtggtttttggcataaaaagatttatccccaccaaatgtggctggacggaatttacatgggagctcctttctacgcggaatatgcattccgtaataatcttccgcaggactatgcagatgtaatcaaccagtttgtcacttgtgcccgtcatacgtacgatcctaaaaatggtctttatcgtcatgcgtgcgatgtaagccgcactcaacgttgggcggacccggtgaccggacagtcgaaacatacatggggacgtgcaatgggatggtatgcgatggcattggtggatgtgctcgaatttattccgcagcatgaagccggaagagattccctgcttgatatattgaataatgtagctgtgcaggtgaagaaacttcaggacccgaagaccggaggatggtatcaggtgatggatcggagtggtgataagggtaattacgtagaatcttcctgttccgctatgtttatttattcgctctttaaggcggttcgtttgggatatattgataagtcttatctggatgtggcattgaaaggctacaaaggattcctggagaattttatcgaagtggacaagaacggattggtaaccatcaccaaggcttgtgcagtggcaggattgggaggaaaggtctatcgttccggcgattatgactattatattaatgaaactatccgcaataacgatcctaaagccgtaggaccttttattatggctagcttggaatacgaacgtttacaaaagtaatttccgacaatgaaaaggagtatttttaaaggaatgatgtgtttgcttctactgggtgtgggagcaacatctgtttatgcacaacaacagcaacgcaaagacacattagtcgtggcacgcgacgggacaggggagtatcgtaacattcaggaagccgtggaagctgtccgcgcttttatggattatacggtgacgatctatatcaagaatggtatatacaaagaaaagctggtcattccttcttgggtgaagaatgtgcaattagtgggcgaaagcgcagaaaaaacgattatcacttatgatgaccatgccaatatcaataagatgggtactttccgcacctatacggtaaaagtggaagggaatgacatcactttcaaagacctgacgattgaaaataatgcggctccactggggcaagcagtagctcttcacaccgaaggtgacagactgatgtttgtcaactgtcgtttcttgggaaatcaggatactatttatacaggaaccgaaggagcgcgccttctattcacgaattgctatatcgagggaactaccgattttatttttggtccttccactgctctattcgaatattgcgaactgcatagtaaacgtgattcgtatatcactgccgcttctactcctcaaagtgaagaattcggttatgtatttaaaaactgtaagctgacagccgctccgggagtgaaaaaagtatatttgggtcgtccgtggcgtccttatgcggcaacggtctttatcaattgtgagtttggtaatcatatccgtcccgaaggatggcacaattggaagaatccggagaacgaaaagacagcccgttatgccgaattcggaaatacgggtgcgggtgcagatacttccgggcgtgtggcatgggctaaacagttgacaaataaggaggcaatgaagtatactccgcaaaatatctttaaggaaagcagtaattggtatccctataaataaaaatacgtaggttttccgactgtttatgcagcttgaaatttttgtttccgggcttgggcatttgctttcctggcttgaaattcccgttccaaggcaggaaactgcagtttccctatgtgggaactgtcgtatctctacgtggaaactagcgtttcttaccggggaaactgtagttcctatacgtggaaactgaatttgtctgcgtgcaaaacaggattatataaggtgttgcagataaacatctgcaacggtatctgcaacagtatctgcaacgctgcaatcggttgattgcaagtaagatatgagcaaaacgttgcaggtggcagataaaaacaaaaaataaaactcataggaggggatgaagaatatgaaaacacttagggttaaaatggtagggctacttgcaacggctcttattcttttttctgcatttcgtgcagacaaaccggtcgtcactatctttatgataggtgattcgacaatggctaacaagaaaatagacggaggaaatcccgaacgtggttggggaatggtacttcccggattcttctccgaagacatacggatagacaatcatgcagccaacggtcgaagttccaagagctttatcagcgaaggacgctgggaaaaagtaatttctaaggtgaagaaaggagattatgtctttatccagttcggccataatgatgagaaagcagactctacccgtcacaccgatccgggtagtacttttgataaaattcttcgtcggtatgtgaatgaaacccgcgccaaaggtggaattccggtattgttcaactctatcgtccgtcgaaactttgtgcagccgaaggatgatgccatcgcaaaagatgtccgccgtacaccgggggaaaaggaacaaccgaaagagggaaccgttttatttgatacgcatggtgcctatctggatgctccccgcaatgtggcaaaagaactgggagtgactttcatcgacatgaacaagattactcatgacctggtgcagggacttggacctgtagaatcaaagaaactattcatgtttgtcgaacccaatcaggtgccggctttcccgaaaggtcgtgaagacaatactcatttaaacgtatacggagcacgaacaattgccggactggcagtggatgccatcggcaaggaaattccggaactggcgaaatatatccgtcaattcgattatgtagtggcccaagacggtagcggtgatttctttaccgtgcaggaagctatcaatgctgttcccgattttcgcaaagacgttcgtaccactatcctgattcgtaaaggaacttataaagagaagctcatcatccctgaatccaagattaatatctctttgattggagaagacggtgcgatactgacttatgacggttttgcaaacaagaaaaatgtattcggcgagaacatgggaacttccggttcgtccagctgttacatctatgcccccgatttttatgcggagaatatcacattcgagaactcatcaggtcccgtaggacaagcagttgcctgtttcgtatctgccgatcgtgtctattttaagaactgtcgtttcctcggcttccaagataccctctatacatacagcaagcaaagccgccaatattatgaagactgctacatcgaaggaacggttgattttatcttcggctggtctacggctgttttcaaccgttgtcacattcatagcaaacgggatggttatgtcaccgctccctctacagataaaggaaaaaaatatggctatgtattctatgattgcaaactgactgcggaaccggaagctacaaaagtatatctgtctcgtccctggcgtccgtatgcgcaagctgtatttatccgttgcgaactaggtaaacacattctccctgtcggttggaataactggggcaagaaagagaacgaaaatacagtcttctatgccgaatatgagagtcggggcgaaggagccaatccgaaagcgcgtgccgctttctcccaacaactgaaaaacctgcaaggatacgagattacgactgtactggcaggcgaagatggatggggtccggtagcggacggaaacaaactgataacagtgaaacgttgacttgacgaatatgtaaagaaatgaattactaagcaaaaaacaatggatatataaaagacaatagatcacttgtcctatagaatggttcgattctgttaaatagccgctaaagattgcataaaagtacaactatttttctatctttacggcacagaacctagttatatgatgaagaaaaccttaatttcagtaattcttttgctagctattgtgttctcgacacatgcgcagcagcactgttttttcacccactattctactgaagatggattgtcccaaaatacggtgatgaacatcttgcaagatcacaaagacaacctttggtttgccacttgggatggaatcaaccgtttcaacggttataccttcaaaacatataaggctcgtcagggaaattacatcagtctgaccaataatcgcgtagaccgtatctatgaagaccgttatggttttttgtggctactgacttatgataatcgtgtccatcgtttcgacccgaagacagagactttcgaacaagtacctgctgccggagaggaggggagtgctttcaatgtgcataccattgaggtgatgccgaacggaaccgtctggctgctgacagaaaatgacggagctatccgcatcctgactcatccaaatgagaatcatcgcctgacatgggatatttattccagtaagacggaactgtttccctctttacatgtattcaaagtttatcaggataaagcaggcaatgactggctgttaacagacaacggcctcggcatgatccatcccggaaagaaagaaccggattcctatttcacggagacaaaaggaaagtttggcggaatgaatcaggctttctatgcagtacaggagcgggataaggacatctgctttgcttcggatcagggacgtatctggtcttatcagaaagatagcggagaatttacgttgatcgaacttcctacaaaagggcagatcacttccattcaccccgttgcaccggacgtttctgtaattactaccgattcggatggtttctttacttataacctgcggaccaaaacaaatgtgcattactcattcctgacttgtaaggctttacccgcaaaaccaatcctttctgcttatgtagaccgttcttcggaagtgtggttcgagcaggaagaaccgggtgttgtagcccattttaatccctcgaccagagtggtgacccgtgaacagattcttattgaatacagtaatcctgaacgttcccgtccggccttccatatccatgaagatgtaaacggttatctttgggtacacccttatggaggaggtttctcttacttcgatcctcaaaaaaaacgattggttcctttctataatggactgggtagtcgtgactggcgtttttccaataagattcattcggctttctccgacaaacaaggtaatttatggctttgcacccactccaagggattggagaaggtgacttatcggaatgtaccttttgcgatgatgactcccatgccgcatgaacatgaatcattgcataatgaggtacgtgccctgtgcgaagacaaactgggtaatctgtgggttggcttgaaagatggtatgcttcgtatgtatgatgccgataaagcttataaaggatacctgaccgaaagcggcatcgtttctactaccggtactcccatgttgggaactgtttattttgttattcaggattcgaaaggaatcatctggattgcaacaaaaggagacggacttgtccgtgccgagccgacttcttccaacggaatgtcttataaactgacccgttatcttcatcgtgaagaggatatgtacagtttgagcgataataatgtgtattgtatctatgaagatcattatggtcgtatttgggtagctacttttgccggaggtatcaattatatcacgcagaatgaagcaggaaagacattgtttatcaatcaccggaataatctgaaagggtatccgattgatccttgctacaaagcgcgtttcattacttccgataataatggacgcctgtgggtaggtacaactacgggagctgttgcttttgatgagaactttaagaaaccggaggatgtgcagttttatcatttctcccgtatgccgaacgatacgcaaagtctgagtaataatgatgtccattggattatttccactaagaaaaaggaactgtatctggctactttcggtgggggactcaacaaactgatatctatcagtaaggacggccacggagagttcaaatcatattccgtactggacggtcttccttccgacgtcttgctttctgcccgcgaagatagtaaggagaatttatggattagtacggagaatggaatttgtaaatttatcccgtctgaagaacgttttgaaagttacgacgaacgtagtattactttcccagtgcgctttagtgaagcggcttccacattgacggctaaaggaagtatgcttttcggtgccagtgggggagtctttatatttaatcccgactctattcgtaagagtagctatatcccacctatcgtattctccaaactgatggtgactaatgaggatattacgcccggagataactccttgttgaaggtggatattgacgataccgacccattggtgctctcacacaaagagaatattttctccgttcacttcgctgcactcgattatactaatccgcagaatatacagtatgcttatattctcgacggatttgagaaacaatggacttttgccgacaagcagcgtagtgtgacttatacgaatcttccgaaaggagagtatgtgctccgtgttcgttcaacgaatagtgatggtgtgtgggtggataatgaacgtatactgaacattgttattctgccttctttctgggagacgccggtagcttatgtgctttatgttctttttattctgattattattctcgtagccgtttatatcctgtttactatttatcggttgaagcatgaagtttcggtcgaacagcagatttcagatataaaactgcgtttctttactaacatatcgcatgagttgcgtactccgcttacgttgatagctggtccggtggagcaggtcttgaagaatgataaattgccggctgatgctcgcgaacagttagtggtggttgaacggaacaccaatcggatgctccgtcttgtcaatcagattctggacttccgcaagattcagaataagaagatgaagatgcaggtgcagcgggtggatattgtacctttcgtccgtaaggtgatggataattttgaagctgtggccgaggaacatcggattgatttcctgttccagaccgaaaaggaacatctttatctttgggtggatgccgataagctggaaaagattgtattcaatttgctttccaatgcatttaaatatacgccgaatggcaagatgattacgatgtttatccgggaagatgaaaagacagtttctatcggtgtgcaagatcaggggatcggtatcgcagaaaacaaaaagaagtcactgtttgtccgttttgagaatctggtagataagaatcttttcaatcaggctagtacgggtatcggactttcattggtgaaagagttggtggaaatgcataaagcgactatttccgttgatagtcatttgggagaagggagttgcttcaaagtcgatttcctcaagggaaaagaacattacgataaggaagccgagtttattctggaagatgcggatgctccggcaagaatgggacaggtagtggatattgccaattcttccattcagtctgaaacgttggtaagcgatgattcggagaagattgatgatgtgtatggggaagaatttgcgaaagaagagaactccaaagaattgatgctgttagtcgaagataatcaggagttacgtgaattcttgcgcagtatattttctccgatgtaccgggtggtggaagctgctgacggtaaggagggggcaaacaaggctttgaagtacctgccggatattatcatcagtgacgtgatgatgcctgaaaaagacggtatcgaaatgacgcgtgaactgcgtgcggatatgacgaccagccatatacctatcattttgcttactgccaaaactacgattgaaagcaaactggagggattggaatatggtgcggatgattatataacgaagcctttcagtgctacctatctgcaagcacgtgtggaaaatctgttgatgcagcgtaagaaactgcaaagtttctaccgggatagtctgatgcatatcaatatttctaccggtcaggaggaagtgcctgtggctacggatatgccgtctgctgaagaagatgtgtccgaaactccacctacaactctcgaaatgtctcccaacgaccgtaagtttatggataaattgattgaattgatggagcagaacatggataatggagaactggtggtagatgatttggttcgggaactggctgtcagccgttctgtcttcttcaagaagctgaaaacacttaccggattggctccgattgaatttatcaaagaaatgcgtatcaagcgggctacacaattaatagaaatcggagaatttaatatgacccagatttcgtatatggtcggcattaatgatccgcgttatttcagtaaatgctttaaagcacaggttggaatgacgcctacagagtatcgggatagagtggggagataataataggaaaggaaagaaatagaaagggggatgttcaaagctccccttttatcgaaatcaccctcactacaactatctgtggcgagggtgattttttgtttatgagagttccgatacatttaccctcatcttggttatccgaaattattttttagggtatagatgattcacaaggctgttcatatacatttccaggtttgtatattccgggcttaatgtatatttggctccgtctgaaggatcattgggattaaggttgtgtttcttttcccattcatcgggaataccatcaccatctgtatcaacaagtgctgtttctgatttatattccggccatcctcctacatcagacggttggtcaatcattccattcgtgcttccgtgagaaccttcgtaagtataagtgcctttgagagtttcatctacgatgcgttggtctatggcgtcacggcgatatgaagcaccggcaaactcgagaacatctttgtaggctttcttggcaggttgcaaagaagtatgttcggctatgtcaaatgcttttttagacagtacttccttttctgtggcaaagtcctttttgataaccagtccgtaagagttatccatattcactttataaagagcctctttctgcttatcggtcagtttgggacaggtaggatccatatagttacctttgaaatagaatacaccatgaacacctgctttattgttgtttttgccatcatcggcatacgctgtaaacaagcgtttgaaagaaccttttgtcgcactgaaaggtcccggtttatagtagttattgataaagttgtaggaacctccttcaccggcataagcaccgtcactgccataattataaatcacattattgaataattccactttttcatcttccggacgacccgtataacggcttccgcaaagacggggtgtgcggttagtgtgatgggcgagtaagttatggtgaaaagtagcaggttgtccaccccagatacccccataaccatgtgctcccttttcgtggatagaattggcgagactttcactgatgatgcaccactgaagtgtgaaattacggttatcatagaatgtggcacattcgtccgtacaccaactcatggagcagtggtctatgataatgttttggtgcgctttagtaccattcattgagtcgtcacctttttgtttgatgtcgactcccatacgggaacggatgaaacggacgataacattgtctgcctgaatagagaatgtatagtttttcaggcaaatgccatcacccggagctgtctgtcctgcaatggtcacatcaccattgctgagttttaatgctttttgtagttcaataattccgctaaccgcaaagacaatggtgcggggacctttcttgctgatagcccagcgaagtgtcccttccgaaccgtcgtctgccagggacgtaacagtgtatacagcacctccggcaccaccggtggtatattttcctgctccgtcggcaccggggaaggcgagaactttggaacgatccggggtaggatagtcctttgatgttttttcaaccgaaatggcaggttgcatggcttgtcccactagaggaaaagccaatatcaaactacagattgctaatatattctttttcattactaatttatcatttgggttcgaatttactaaatttattctataacactgccacctgtcgcaccatttaccatgatttcgtgcaccagactattgagatacatttccagattagtgtacttcccgtttttgtcaatagtcgtttcttttccatcagcagatttcttgggattcaaaccatattcttcttcccagtagtcgggaataccgtcaccgtccgtatctttcacgtttgcattggttacagatttcagaacatcgtagggatcatttactcctaaggctgtgcagacatctttcgggtcgttgatatatccacttttgttttgtgagtagccggaaagatctttccatttgctggcatctcccgtgcaacttgcttttctgtttttaacgtcgctgattatcaactcgtcgactttatcacgatagttgctggctcctgcatagctcatcacacgttcataagcctcatccggcgtatgagttcttacatttcctgccttaactaccggtgaacttgattttatctgggtatgttggttccaaagctccgtagttgcacagtttttattatccatttgttcaaatacgccttttgtccagttatcattgctaacagtcgtattgcctaccactttatttccgtcgatataaaacttcccccaagtttgaagccattttttgtaagcttcgccggagtaattttccggatatacatccggcttggcgatacggtaagcacggtctgctttaccgctttcatcggttccggggcctggcttgtagtagttgttaacgatattcacgtgttgcgcttcaccaccgtagcagccttcgcctccccaattgtagtaaacattgttgcgcatatccactcgctctccatcgttgttgttcagtgctaatgtagtatatcggggaccaaggcgtggaacacggctttcgcaatgggctatcaggttatggtggtaagaggcatagtttcctccccagttaccgccatatccgtgagaagcgaatttacctgtggcagcattgatctttacatcagtcacacgtaaggcttgataagctaaacaccattgtacggtagaattttgcataccatagacagaaagacattcatcgcttccccagcttaccgaacaatgatcgatgattacattttgtttgtcacaacctcctaatccgtcgcagtctacgttagagtttccggggcggaaacggatgaaacgaatgatgatattgctggaattaatcgtaaatggataattggcgatacagataccgcccggtgatgtttgtccggcaatggtcagatcatctttctgggtttttaattccgatttcaaatagatggtacccgacacatcaaatacaatcgttttaggaccgtcttgtttcatagcccagcgcagacttccgctgatacttccactggtgtcgtcttcaaggctagtcacatgataaacttttcctccgcgtcctccggtggtattgcgaccgtggccttcggcgtatgggaaagcaagaagttctccataatccagttgcttgacatcagaagatgtcccacctggattatttgttcctccacctgtatcatctacaggatcgtcggaagagcatgaggtacataatcctgcgatgctgaatgcaatagctacataaaatagagatattttctgcttcattatcttttaactgtttggggatatagacgatttatttgttgggatacaacgtttctaccagactgttgaggtaaacctccagattggtatacgttttacttagagtatatttggcaccgtcggccttacttttggggttcaaaccgttggcagtctcccattcatcagggatgccgtcgccgtcggtgtcttttggaccggtttcctttttatattccggccagccacctacatcgctggctttatcaatgagtcccttttcactgccattgctgccgtctgccgtataatctccgttgcgaacgttggctatgatgcgtttatcgacatcatcatattttaaggaagcaccggcatactttaatactgattcataagcttcttttgccgattgagtgaattcggatgcatcttcggaaatagtaaattcgttacttgactgaagtgctttttctcctccatcgggtaaaggaacggcttctgttgcattggggtgtaacccttgccagttgtcattgtttacagaagtaagcagagattgatattcggctttcaattcaggacatgtgccatcaaaatagtttcctttcagataaaaagtaccccatatacctttggtgtttttatttgtaccgtcatcaccgttaggttggaagatacggtttacaatatttttcttggtattggtaactggtccgggcttgtagtagttgttcacgaaattatagcttcctccttctcctgcatagccaccattggtcggtccccagttatagaaaacattatttcgtaaatcgagtttttcattttccggtttccctgtatagcggctaccgcataaacgtggtgtacggctgctgtggtgggctaataaattgtggtggaatgtagcgggtgatcctccccatattcctccgtaaccgtgattacctttggtgtgtaccgaacgattcaaactttcgctgatgatacaccattgcatggtaaagttagtgttatcgtagaaagaagcacattcatcagtgctccaactcatcgaacaatggtcaatgataatatttttatgttgctttccccacaatgcatcaccgctgtcggcttctgcttctgttgtaaagttgtccgatcccatgcggaaacgcatgaaacggatgattacgttgtccgcctgtacggatacgggatgtcctttcaggcaaataccgtcacccggtgcactctggccggcaatcgttacatctccgttggttatcctcaaggggcttttcagttctatcaatccacttactgcaaatacgatcgtgcgctttcccgtgcgatttaatgcgtagcgtaatgttccttgtgttgtcttatcgttgtcttcaagcgaagttactatatatacatctccgcctgctccgccggtagtataacgacctgcaccgtaagcacccggaaaggcataacgcgtttcggcaggtgtctcttcttcaccaccttcgttctcattaccaccgttaccggtattctgtcccggtgtttcatcggtgatacttgggtcttcgctgctgcaagcaaccgataggttgattacacagaagcacaataatcccattttaatagatttgagcatacaaattatcttttaaaaaaatagagttctttgtctcatacattatatttgctgatgatgtgacaaagaactctttattaaatcttattggttttattcgcttactgtaccgtactggcttacagttttcactgtataaatattgctttcgtcagtgttggtcagtgtaacggtagtgtctgtcgtttgccctgcatagttaccattcataaagatgaggtagccggcagcaccggatactgcatcccatgtcagagtgtttcccgacagattgacattggtaggtgctgcaaggggagtttccatatactctttcgggttccagctgtcaatagttattatattctcatatgtatatttagcagcttcggatgctgttagcactgaactagtgaaggaaacgtttccggaggtgattgttttactttccgcaatcatatttccattcttgtcgatagtgttatattcagcatatagtgtaggtacttgtccaccatatccccagtgtgaatctataatatccattttcaacttggtgttgatccagacagttttcgtggttgtggcttgggaacgtccgaatgagaattttgtatcatcaccgtttaccgtacaatcttttataacatatccgtatttatcgctttcactggtacgcgaagcagttataacgctaccaccgtcattgcctgtattatagaatgtactgttttcgataagtacatcgccacttccccagatataatctgtatgaccttcaatccatgagttataaacgtatgcacgatgaggggttgtattgttccaataacgggtccaccatgtatcctggtaggagacaagcaaacagttattcaaagcaaagcggtcttcacggtttatcaaggcttctgcctgtccgtttttacctaaaccaccagtgtgacgatttgagaatgcaccataaagattgatgattgaaatattttcagcataaaagtctgtggcttcaatcaacactactgtgttttggtcttcactatatccggctttgcgggctggtgaattttcgttgaaaatagaataaggccatgaggtagcattacttgaatcatctacacggtttactgcaaactggattttaacaccatcacggctctcaccgattaaatgaacaaatggtttattcttattgatccggacacattcattataagttccgttggcaatgaagattttataaggactggtaggtggggtagtgatggcgttgattgcagcctggagagtagtgtaatcaccattcccttttgaatcaacaattgcatcgaatacttttccaccgcccgaaatttcagatttggcagtaaagcttaaaaagaagtcttcgtcgtaagctcttccctgcatatccgttaatgctccggcaggaacttcgaaagtacattctttgttttccataccagagaaggtataacgtactttttcgtagttgatggatacacgcactactcctccgttgaaatagatttctgtatccggagcctgacgcatagctttgctgaaagtcagttctacatatccgctcggacctactacatcaccatcattgatattctgtgaaatcagaacagggatgcttgtatcttctgcatcatcgttgtcattacaggaagcacctgtaagaatcaacaagaacagaagtaagtatttacttattgtattgattgaatttgtattcataatatctgttgctttttagagaagattctccgtcaagtaaatgcaaattccagacttgacggaaaaccttgtagttttatttagttatttgttccaacgttggtcaccgactctgtattcttcaggaacatctgctccaaaagtcaaatcttcacttgaaccattagggaatagctgatcggaagtcagaggaagactagtatagtcttttccccagtcgggtgtaacaaatgaaaagtcagaagccttatacaagccgtttacgttcagggttgtagctacggaacttgtgttgtagaaaggtttaactccacctttggcaaacagggtgtttgatatagttattgtcatgtcttttgtatctctgcagaaagcatcacttgctgacatatcatagaatgtacaatctttgattgttattgtaccgggttgtcctgacttgtgtcttatgaattgagacgcagaagctcccttggatacaataatagaagtgttggaaaccactaaattgagagttgttaatgttaccttgtcagaaagaagtaatccataatgattggatgttgctgctcttcccaatcctttgatgatacagtcgtcaatagtaacagacatagcattacttgtacttgcattcatacgaacgataccacggatattggtaattgtacacgaggtaacttctatttctttgatgcaacctgaagcaccgttttgataaataagggttgtatttccttcatcggtaatattcagattatggaattctactttatcacatattccgctggcacctatgccttttttaatagtcatattaacctgtccgtcttgactgtcaccccagaaaataaggtgagtcacgccagcagcaatgctttctttttcttgtgcaaatccttctgttccggaaacattgattaatacttttcctgaaagattatcccagttggcaagggcatcttcccatgtcatttcagtataccccgtcggtttacctttcttagttgtaaaggtgatacgagaacatatagagccgtttgcgaaagcataagccgtatattccgtactggaagccaaacctgtgattgccaccttatgtgcagcaatatctgctggtgataattgggttcctgattcaggtactccttcggtagaaagaacacaagcatattcatctacatccaccgtttcttcccatgagaatacagctgaatttgctgttatatcactgatggtagattcgatttccaaaccagggatggtaacagtctgtgaaccacgcggattatttccattataaatagtaatcgtgtattcagtgaatgacttcaaattttcaacccatgcttcacctgcggcagcttctgttgacgaaataacacgtgaagttgcttctgtggcacccgtttccatgatttcgaaatgatcgactgctaatccggcttcccatgacatacgtacttttccttgaccttcaggtaagtcttcagtagttggaatatttaggatagcttcttccttaactgaagcaaaagtctttttataatttacccaacgagattccttctctccggaaatagacttgatacgcatataataagtcgtatttaccgccagattatccattgtgtaaggtgactgcttgatccggttggcaggatcatttccataaacgatatttccattttcttctgatcccattggagtttcgtcagtcatctcgttaggactaatctcgataatgtaatagtcggtattggatgttgagctccaagttactaccgctctggctactttactgtctgtttctacactgattccgttttcatcagttccgaaaggacggctataggaagagtcaatatcccaatcacttttctctgtacacgaagatacagccaaagaggtcaggagcatgaaagctcccattcccaatatattttttatattcttcatcattttacgattttaagattaatccgaataaccataagagttatgtaatttaccgtttgaggtagagatggttgtagaagctatcggcaataaataacgattcttcacagccttgttcaatccgccagaaatactaggcaagtttactttcagattcttttgctccttgtcactggtttcagctccgaaaaagctcttgttttcatattctccacctactttagctccaaatacgagagaagtcatatcgatatacatcggattgtccgtgcgatatttatagttcacatactgtggatatgtaccattatacactgcatttgtatattcgtttttgaattcgtctattttttcgctcaacaggttccaacggattaggtcgaacttacgaacaccttctcctgccagttcccatgcattttcgtcaacaattgcatcgaagaagtcttttcccattagagcagtccatgcagcatcacgtttggttgcatcggtgaaagcacggtcgtgtacttctttcagggctgctgtggctgttaatgtacaaccttcggctgttgcacccttaccataaagttcgttcacaacttcggcatacatcagcaatacttgcggataacgcattttcactacgttgataccggaacaaactttctgatcgctggccaatacagctgcgtaccattcagagttttccatcatcttacgataatcccattttccacaataaagaccgaaaggagcatttcctaacatatattctttaaatactttggtgtttttgtctgtagaaagttgtgaaatagcacaagtcagatcgcggcggatatctccttcgccaaatgacagataataaggagcagtcagtttcaacttaccggatgagttacctttcggaccgaatagggaactggcaccgtttatacgatatccgatagtatatcccagctcaccacttttgtttagtcccattggaatctcgaacaggttttcttgataagtctgatctagttgtccgatatttattaaacgccagtattcttctacagaaggattcagtttatgttttcctgaactgacaacagctgccagatgtttttcggccaattcgaatagttctctacgtttggtatcgctgcaacgttgagtaggataagtagcgtcactgttatctccggtgatatatccgtctttagcttgttcgcggatagcatatccggcacgtgtcattgcaatgttagccaagagagcgtgagcatagcctttgcttacatgttcggttgtataaccgtcttcaccagcccaaggtaaatatccgatagcttcctcgagttcaattatcaattcatccatgatatcgtcacgatctgcctttccaatgtaaacattagacaggtcgctgttggaagattctgttttgaaaggaatatcaccgaacaagcggatcagatcgaaataaatcatcgcacgcaatgtcatcgcttctgcacggaatctcatcatgctggtacgggttgctcctgcttgttgtatcagttggctattgtttataccatctactaccagattcgcattctcgattactccgtacatggcatcccatactttggaaagttgtgaccatcccggattagcgttgtagttcatattaccacgttcgctggacgtgttgcttgcatccgtacccaaaccgtcaatcagttcacagtcggtattggttccggcaatgataggtaggaagttagaataagtctggtcttgcgtcaggctgccgtaaactttattaagtgccaattctgtataataggcattattaaaagttgattcattatccaattcagacggtgaggtctgattcaggaagtccgaacaggaagacagggcaattaaccccagccccaggaataatgtcttatatattttcatacgatcaatctgtttaatgttttaattagaatgtaacgttaataccacccacaaatgtgcggctcttaggataagcggcgtaatctatacccggagtcatcgcatttttcttactgcttgtatcgacttcagggtctgctccgctgtagttagtccaacagaacaggttatatcctgtcagatagattctcacattctgcataaacgctctccttacaattgttttcggaagagagtatccgatagtaatgttattcaaacgcaggaatgaggctttttctactgcataatcagtcagctgcatggtagtagcgctggccggattgtacatattggcgttagcgtttatttcattcagacgtaatcctgctgttgtcatgtctccataggtattaaggacatctgtagagctggacgacaggttcaaaccagtttccggatcaatccatgtgtaacggttagacagtctgaaatcattgtttaagttataaccggttcttgaacctgaacggaaagaagctgccagttttgttccattgacaattacatttccgagagagtagttgaagaatacattgaagtcgaaattacctacgcgaccatcgaatccaaaaccaccggttgtaggagcgatagtgttacccaaacgttgtttgagagggttaccatctttatcacattccagtttcaaaccacccggatagtatttaccaccggtgatagtaggactgttatcttgcattccgtcttttaatccccattcgctacctgcccaaaccagttcgccggtagggttggtgacaggatcatatacagtataataaccgtttgtcttatatccccaaacttcacccaaacgtccgcctttctctacgcggaagtcttcgtatttggccattgtactacctgaccagttactactttgccagggagagtctgtattcagtttatcaatgcggttgcggttgtaagcaatgttggcattgaagttcaaagagaaattctttttatcaaataaaacagcactaacagacaattctacacctttattggatgtctgtccgaagttcttgtactgatagttatatccggagagagaaggaatttcagtacgcatcaataagtctctggttgtattccagtaaaagtcgatagcaccggagatacgattgttccagaatccatagtcaataccgatgttacgggtaactgttgtttcccacttcaaatcggggttgtataagttcgttccatgttccaacatggtagtgctttctccgttgaagaaaggattgcgtgcatcattacctcccaaagagtaagtggtggaaagcaaaccggaattgatacggttgttaccggcagtaccgaagcttaaacgtagtttcaaagctgacagccagtcttgagtgttactcatgaaagcctcgtcagagatacgccatgccaaagctgctgacgggaaaacaccccaacgatttccggaaccgaacttgctcgaaccgtctgcacgtactgtaacagcaagcaagtatttatccatcatagtatagttcacacgaccaaagaatgataatatgttttcttttgcagcaatggtagattggttggctaaagctttgcccgaacccatatttgctttcatatcatcgaaattcatagtaacagggaaagctacagatacattttctattgatttcctttggctgctgcttacttcatgtccgatcaatacattgagtttatcacgacctttgaacagttttttgttatcataggtcaatgtgttggcattacgccagctcatcgtcttttctctcaacaggtaggcttgtggctgaccgttatatccatatttagaattagatactgcatctactccccaatactgttctgtatcgtcaaacttccatccatatccgaattcggaacggaatgtccagttcttgaatggtttccagtttaaacctacattgtagttctggttgaaagtattgcgggttttatccgttgcaagcagacgttccaatggagatttctgttgtgccgaactgttttcttcgtcgtcatcactgtatttaagtgaatcaaccggacggaatacggtagcattagccacagttgaattggcagcattggattcattggtatcagcaccaccacctaaaccgtcaatggtagagtaacttaaccgggcgttaaagtccagtgtcatccatttattcagttctgatttaatttttgcatttacattgtcttttttgaagccggaattaagcatgatacttttttcttcattatgggcatagctgacactataagtcatttgcttggttccgccacttacattaatgttgtattgttgctggtttccagtacgtccgaacatctcgtcttggtaatcggtaccatcaatagaacgccagatatccatatcggcaaagtttccataatccagagaaccgatttcacgctgataagcaacgaaatcgtaaggactcaagacttcagtcagtttggttacctgtttaaaaccgaaagaagcaccgaagtctacttgcgttttaccttcttttccgctcttggtagtaatgatgattacaccatttgcaccacgggcaccataaatggctgtggaagaagcatctttcaatacgtcgatgctttgaatttccgagggagcgatatcactaatgcttgaaacagggaaaccgtctacaatatataaaggagagttatcctgtgatagtgaaccaccaccgcgaacacggatctttatatctgcatcgggagaaccttcagtagtagtaacactaactccggcaagtttaccggtaagggcttcagatgcacttgctactggtatagcagctaagtctttggcactaacagaggctacagaaccggttaaatctcttttattgaccgtaccgtaaccaattactacgacttcgtccaaagctttcgagtcgtcgaccatttgtacattaattgtttttctaccttgaacggctacttcttgagttttcatacctatgtatgaaataaccaatgtttttttgccatcaactttaatagaaaaattaccatctaaatctgtaatcgtaccattggtagtattacctttttctacaacagaggctccaataacaggctctccgctggtgtctttcacgttaccttttacggtaatcgtttgcgcagatacgctaagcgatattgctgaaaatagtattagcaataaggagcgcatgtttttcactttgttagacattctttgcatgtttattaattaatggttgttgtttgatatttcataaaaatcccgatgagagttcattcatcgctacaaaagtatgagaatgaagatatagtgatgtgcaatatttgtttttcacctcgtattttttgttttttagtttgttgcgaggtgtagttattagctttgaagggtgttatttgtgttctaaaggccggcaaatatacgaatcagagatttataaattgattttttcaccggtttttatccggcattcatcggaatttataccgtaaatcaactgaaaagcctgtggaagcatagggaaatgatgtatctttgaaccattaatcaattaataatagaaacaatggaagagaaacaaaattttccccgtgctacaggcttttccggtaaaatactgatagctttgctttttatcctttccgggattctactgtttgcccgtaatatgggatggataacttcagaagtatttgatttgatcgtatcctggcattcactccttatattattaggtatatatgcaatgattcgccgccatttcatcggtggaatcatcctttttctggcgggtgtttattttctgataggaggactttcctggttaccggaaaattcacaggcaatggtgtggcccctcgctctgataatagcaggtgttttatttatcttcaaacccggcagaaataagagggcgcaatgggctcgtcagcatacaatggaacatcgtcggcaatggatgaagatgcatcagggtagacccggcatgaactttgagagtgagcaacaacaatcggaatcagtagatggctttttgcgttcggagaatgtctggggagctgcacgtcacgtagtacttgatgagttgtttaaaggagccatgattcgtacctctttcgggggggacgactattgatcttcgccatacccatattgcaccgggagaaacctatattgatttggattgcagttggggaggagtcgagatttatgtcccgtcggattggacagtcgtcttcaaatgcaatgctttctttggaggatgtgatgacaaacgctggcaaaatgggaatgtaaacaaggagaatatattggtcattcgtggaacgctttctttcggaggcttggaagttaaagactagcgtatgaaaccacatccgataatagattatccattccgctggattccgatgctggtgctggcgtttattctggttgcgacacaggtggctttagtctgtggatataccggaaacgactatcttcctgctctggtagatggagtggcaacaattggttggctggcagccatagcctatttggcctggtttgtggtcggtcttgtttcgttgttccagacggatataatcatgataatcgttggaagcctattatggctggcgggtagttttatgatctgtgatatcatggtgaggattgtaggcatatcctatattccttttgtgcagaccatacctttccggttattgttcgggctgccaaccttgattgccattactttatggtatcgcttgatcgtaactaaagaagaagtacagaatcaggaactggataaagaattggctgcacatcagctaactgtgaccgaacaacaaggagaaccacagacagaattaatagatcgcattacggtgaaagacggttcccgcattcatctggtaaagacagacgaactgatctacatacaagcctgtggagattatgtaatgttgataacccctaccggagaatatctgaaagaacaaactatgaaatattttgagacccatctgtctcctgatacttttgtgcgtgtgcatcgttctacgattgtcaacgtaacacaaatttcgcgggtcgagcttttcggaaaagaaacttatcagttgttattgaagactggcgtgaaacttaaagtaagtctttccggttaccggttattaaaagagcggctggggatctaaaatttgttcaatcttatcataaaaactgatttttcccccatatcggtcaaaaaatgaatgtcagaatgaaaagcttccactacttttgtttccatcatctaataatgtgaataaggaaatgaaaagaaaattagtttatgtttgtctgctggcaatggttgcgggaggaatgatgtccttttcctatgacatacccgaaaaacaggagacaggcggccgggaagatcgagtgatctcttttcccggagctgaaggacacggtagatacacgacaggcggccgtggtggtaaagtgtatcatgtgacttctttggaagacgatggttcgcaggggactttacgttgggctttgaaacaaaatggacctaaaacgattgtctttgatgtggcaggtacgattcatctgaaatcggaattacgaacagggaaagatcatctcaccattgcaggacagacttctcccggaggaatctgtctggctgattatggcttttctattaattctaataatgtaattatccgttttcttcgtttccgccccggagaagccagtgggaaagaacccgatgggttgggcggctgtgataagaaagatattatggtagaccattgctctgtcagttggagtgtagatgaatgtctttccgtttatggtatggaaaactctacggtacaatggtgtattggctctgaagcattaagaaaagcgactcatgtaaaaggggcacatggatatggaggcaattggggaggacataaagcttcttatcaccataacctgatcgctcactgtgagagtcgcgtgcctcgtctgggccctcgtccttctacattagctcttggcgaatgtgttgatatccggaataatgttttctacaactgggctggaaacggttgctatggcggggaagatcagcatgtcaatatcgtcaataactattataaaccgggaccggcaacaaaacaggcttccaaacaggtgcaatatcgtattgccaaagtcggagtttatccgcaagcttatgtttacgttgatggagaacccaaaaagaacttggcttttcaaccttacctgcagaaatggggaactttctatattgatggaaataagatagaaggtaacaacaaagttactgccgataactggacggacggagtctatgcccagttgaagaatgatgaaaaagtagatttcctctggacagaagatgccaaagaatctatccgtctgaaagaacctcttgattttggagtaatcactacttattcggctgacaaggcttatgaacaggtgatgaactatgcaggttgctgtaattatcgtgatgaagtagacaaacgtatcatttccgacacccggaaaggaacggcaactttcaccggagaaggaaataaacccggatttatcaatagccccaaagacacaggcgattctccctggccggaattatcaatagcaggtctttcggcaccggtagattcggacggtgatggcatacctgatgagtgggaaataaaaaacggacttgatccgaataatcccgtagatggaaatacaaaaacgaaagatccgaatggacaatatacgaatcttgaggtatatttgaatagtttggtgcaacatatagtcgatgcacagaacaaataggtaatcagcaattccccgttcaatgcggagaatttagatgatatgcccttcaggtgttttatgataacatttgaagggcatatcttttttgtgcatggctataccagaggggcacttttttaccccagtccgttttttactccttttctactaaatcttactctatcttctcttgcttaatcctcaattttgcactggtgaaagaacaaaaaaatcactctagcgaaaaacatcattaatgtacaatgaaaatctaaacaaatgagaaacatgaagccagcacttataatagccaatcctccttaggcttgaatccgccttttaaagaaaaagggcatagaatttttattcttttaataattgtatatctttaaattatatataaactaatatttatgaaacatctagcaagtttatttcttctgtcatttctgctttgctgttcttgttcacagcaaatggatgatgaatggaaaccgaatgaacaacttccgaatgtgtccgaaacccacccggttggcgtttttttcagtagggctagtcttgaaacttttgctgaacatggaattacagaggtcggtgtttatgtctacctgcaagattccatggtatatggaaaaaatctccctttaaataatggagatttaaaagtcgaccttcctttaggagaaaatctgcaaaccttcatcgtggcaaatgccgatcatctggtggatacagatagtctttccaaagtggtagtttatcaggatgctcatattcaaaagccggtttatatttcggatgtcgtaggctttacttcagataactcggtcagttcgctcaacgtagaattgaaacgtttagtcgggcaagcagtgttccagccgaaagagacggaggaggaattgagtgctatcactcgttttgaccagttgaatgtcacttttacaaatgtggcaataggctataaagtaaagagtaaagaatgtattacagaaaatgtgaccatctccactaatctttctaccggctttggagcttcggtttattcatttcccacagtgaatggagattccagaacatctatagatgtggtatatctgaaaggaggcgaggaggtgaatcgcatcatcagccctcttgataccggtataggctttgagtcttccaagcgttctaccgtacatatgaaaattacggatgagaattacttggacgagccgtggccttcggtacgcacagtcatgtataagagtacatccgctcaaccgtttacaatagaagtttcagaattttaaaacaggagttatatgagaaatatattctattcactgacgggaataatgctcctgttgggaataacagcttgttcggaagaagaacgatatgccacttcggtagtaaaagagatacaactgtttctggatgacgaaccgtgggcggtgaacacaggtgcctctaacaaacccctgtttatctatacagccgatggtgagtatgtagccaactattcgtcgctttatcgctttcagttgcccaatgggagttataacattatttctaccacacaatccgattctattcccagtccgaagaatctgaatgatattgtgatacatcaggatccgacggctaaaacaaaatatgccatttcggcaccggtgacgtataaatccccgttcgacgaaccgcttagtgtgcgtatgtacaatcgtacaggtgtgcttcgtctgaagtctaccgatcgtaaatcggataaaagctactcgaaattacgcgcagtcgtttcttcaccaatatcaggatataaactatcggatgctacttttgtaaaagctccgacagatgtgcaacgcgagaaagagacaacaaccggtggagtgaactacaccgatgactttgtattgtttcaaacgcaaagcgaaggcggaacagtatctgtgcgtatcgactatctggataagaataatacggtagtccaatctaaagctatcgatggcacattccccatcttgcctgatgatacggtacaagtggcgtttgcactgaacaacgtagatgaaccgatcatacaagattacactgtaacaattgcttcggaaggatggaacgaagaagatatcaatccggaagctccgatgagaattcctgacggatacagatatgtaagtccggaagagaaccttgaatcaatctgtaaatcaatgctggcggatgcttctgtaaatgaggtgaaacttttcctgaaagcaggtgctacctataaattaggtacacagaccgaaataccgaaagctctctacatcatgggacaggcaccgggtgatggtgaagaattggcatttatggaaatgggcaacatgagtatcaactgtcctgatgccattattgaagccttccacttcgagaatctgaaaataaaggtgacaacttccgatttctttaagtttaaaaaccaagctttccatgtatctactatctcttggaagaactgtgaaatcagcgatttggtacgtacaatgtggtatcaggaagtagatgctgcacagaaacagattgccgatcatattgtgattgagaattgtcgtttcttaggtttgaattccggtggaagtggcctgttcggtctttctaccaagcaggacgcgccggtacacaactttgtgttcaagaactctacgttccatgccaacaatctgacaagagctttgataaccggtttgggcagtatgacaggcgaattgaatgtgacaatagagaattgtacatttgtgagtatggctcctgctgcaatgaccttcttcgacttaaatccgaagaatacctcttcattccacttagttgtccgtaataatctctttagtggtgtttgtgaagtcggacagggaacttggttcactacaagaaacgtcacaagcaagactttcgagaataactatcgcaccaatggctttgtagtggctaactggggagttgatactgctgaaataccggtagaaacagctctccctatggaaacactcttcaaagatgtggctggtagagatttcactattactgataaaaactccgaagtatatacaaatggaattggtgatccgcattggattaaataatcaatagagtattaacaatataaagatataaaacatgagatattttctattcatattattggtaggattgttgagcgcatgtagttcggacgacgaatctaatgcgggtgcaacagctgccaaactggaagtgtcgaagaatgaggtgaagttgagtaacgtagacggttcgtttacaatcaacgtaacggctacctctacatggactgccgaagtgacctcgacaggcgactggttgactatatcaaaaagctccggagaggggaatggtgatctccgtttgttttttaccgagaatacagacggtcccaagcgcaccggaacagtaaaagtatcaatgtcgggtgcaggctcgacattggaacaagagattagcgtagagcaactgggggccgatcccgatattttgtttgattattcatcagaccctttgtcattccggggaggtacattcacctgcaaagtagtggcaaatgtggaatgggaactggagatagcagcagagtacgactggatcaagttgaaggaagcaactcccagaacccgcagttttgtgacggatgaagtaacatttgccgtagatgcaaatgcaaacaaaaccagaacagccgtcctgatattcaaatccgtaggagattatacattgcagcgtgtcctgaaagtgacacaagacggtgtaagcggtgaggtgacgatagaacaggatgagtatatcattccttataaatgtcctaaactggttatctcggctccgcaaggagaaaacccggtagattacgatgctgtaatatccgagagttggattacgcaggataagaaaaactctactgccaatgaagtcgtattgaatatcgaaaataatgaaacagtctttccacgtacagcaacggtagagatgttggataaagtaattaccatcttccaatatggtaaacccgatacaagcatcggtgacgatcattctacttctatactcgctttcccgggtgccgaaggtggcggtcgttttactaccggtggtcgtggcggcgaaatctatcgtgtgaccacgctggcagattataacaaaaacgaaacccctattgagggcagtttacgctatggaattgagaaatccaaccaaccacgcaccattatttttgatgtatccggtatcatcgaactgaaaagagggctgtatctgaatgaatatcctaatttgagtatcattggtcagaccgcaccgggcgacggtatcacattgaagaattacaacttcacctttaacctgtcgaaagatccagctattggtgcaggtggcagtctgaatgctattgttcgtttcttgcgttgccgtccgggcgatcagtttgccgattatggagaagatgcgattggcggacgctatttcaaagatgccattatcgaccatattacagccggatggagtgtggatgaaacactgactttctatggcgtacagaacttcacggcacaatggtgtatcgcttctgaaagtatgaacctgtctaaccatgccaagggtgctcatggttatggtgctatgtttagtggagataatgcttctttccaccacatactgttagcacaccacggtagccgctgcccgcgtatctccgatttgtctgctcccggtacacaagaatcttatgactttaccggatatttcgatgtgaggaataatgtctactacaactggagtggaagaggacaaggcagttatggcggaaagtatgctgctttcaacctgaccaactgctattataaaccggggccagctaccggaacaaacaaccgttcttaccgtatcctgtcaagtgatcctactgccagagcttatatcaatggcaattatgtgttaggtaacacaggtgtcacggctgataactggacagagggtgtttggggacaattcgattcttcactgggtacggttcctgaagcagaaaagcaagctatgaagatggcagattaccaacctttcagcaaactgaccagtcacacggctgaacaagcttacgataaagtattggaatatgccggagcttctttgcgtagagatgtgatagatcagcgtatcgttcgtgaagtaaagaatggtacttacacctatatcggttccaaacctgaagaagacggcaaagccaagcaacccggtatcattgatacagtatcagatactgaaggttacattaaggtgaagtcgttgaatccctggcctgatacggatggtgatggaattcctgatatttgggaagaagcttacgggttgaatcctaacgatccgagtgatgcacaaaaaatcagttcgtcggttgatcctaacggacgctatccgaacatcgaagtttatttccacaacttggttcagcacattatctattatcagaaccaaggcggaatagtaatggaaaagaaataaaggtgtggagcaaataaatctatttacaataaaagcatagaatgatgaataaaataatcataagcatatttatcctgctgtgggtagcagtgggtgctatggcacagactgctaccgtgaccggtatggtgaccgacgatatggggccggtaattggtgccacagtaacggtgcaaggcacttcaataggtgcaacgaccgatttggatggtaaatttacattgaccagtgtgcccaatgtagccaaggccgtgttgatagttcgctatgtaggtatggaagaagcaaaagaaccgttgaaaggacgtacctcgaacattaatatccacatgaaagaagctgttggaatgttggacgacgtagtcgtaatcggctatggtacgcagaaaagaggtaatcttaccggttctatcgccagcgtatccggcaagatattggagaaagtacagaccacttctgctgctgaagccatcgtcggtaaactgccgggtgtgcaggtgacagctgtagacggttcgccggatgctgaaattaagattttggtacgtggtggcggttctattacacaagataacagtccgcttatcatattggacggatttgaagtaagcagtctgaacgatgttccacctaccgatattgaatctatcgaggtcttgaaagatgcggcttccacagctatctatggtgcgcgtggtgccaacggtgtaatcttggtgacaaccaaacgtcctgttgaaggacgggttgtcattagcctgaacacttatgtgcagaccaaagaactttccaacaaactggatgtgatggacccttacgaatttgtattgatgcaatatgaaaatgcgcgtcagaaaagctctaatcctacagcttttaataataagtatggacatgcttacgaacactacatctatcagggaaatgccggaactgactggcaggacgaggtgttcggttccaatccggtggccaaatatgtagaccttagtgtgaatggtggtacggagaaagccaaatataaactatcctttatccatcaggaccaaccgagtgtgatggtaggcaacggactgaaacaaaacaatatgaacgcttctttcaacttcaaaccttttaaattcctgacgttggaataccgcacgcgtttgttgcataaggaagtagatggatccggtacggaaggcgttagtttgttgactgctttgcgtgaaaaaccgactaagggtctggatgaatatatgaaacttcccgaagacgatacgtatttcgatcccgatcaactggaagaggaaactctttttgatcccaaagaagaatcgaaaagaaattataaaaagagaatcaacaagtcgctcaatacgatgggagccgtgacctgggatattatgaagggtatgactttccgtagtgaatttggtttcgagaataactctgaagaacaacgccgtttctggggtatggagaccagtaaagctcgtagcaacaataaccagccggtggcggaatggagcatgaaacaaggtaccaagtggcagcttaccaacgtgtggaactacaactttatgctaaaagaagcacatgatatccgtctgatgttgggacaggaaatcaagcataaccagactactaccaaaacttactctactcgtttttttccggaaaatatcacggcagaaaaggtctttgataatttgtcgctgggtactccttatgagaactcctcgtcagcggcctctccctctcgtatttcttcattctttggccgtatcaactatggctataatgataaatacctcgctacggtaacgctgcgtgccgatggttcttccaagtttgccaaaggtaaccgttggggattcttcccggcaggagcgttggcatggcgtatctctaacgaagactttttgaaagataatcaggtcgtatccaacttaaagttgagattaagctacggttcttccggtaacgaccgtatcgatgccgacctttatcagaaattgtatggggtaagcagttcccgtcctgccggatggggagaagtcagccactattactataacttctataactctaaatatgtgtacaatcctgatgtgaaatgggaaaccaccatcacacgtaacattggtattgacttcggtttctttaaagaacgccttagcggtacgattgatgtgtactggaatacagtcaaagatttgctggtgccttcggatattccaggttacacaggctacactaaactgatgaccaatgtgggacagacatccaatcggggtatagaacttcaactgaatgcctggctgatagaaacgaaagacttctcactgaacgccacattcaatatcggtcataataaaaacaagattgataaactggcaagtggtgaaaaagaatggattctcacttcggcctggagaaatgacgtcgtgaactctgatgattatcgtgcctatgtgggtggtaccagtggtttgatttacggttatgtcaatgatggattctataccgtagccgattttgaatctttcgactccaaatccagaacatggaaactgaaagaaggagtggtagattcaagcccattgtccgacactccgcgtcccggtaatgccaagttcaagaaactcactccggtagatcccaacagcaccaatccttatcagctgacagaagccgaccgtactgttattggcaacactactccgaaattctcgggaggttttggtctgaatgctacttataaaggatttgatatgagtatgttcttcaactttatgtatgattttgatgtactgaatgccaacaaaattatgctgaccacttgggcggacaataaagagaacaacttcctgatggacatcgcttcagataaacgctggcgtaacttcgacgacatgggtaatgagatccgttacagtccggaagtactggcagaattcaataagaatgctaccatgtggaatcccacttccatcggacgccccatctgtatgtcgtatgccgtggaagacggttcattcctgcgtcttaattcagctaccctcggttacaccttaccaagtgtgtggacgaagaaagtcggtttgagtaaagtgcgtttctatgtatcgggcaataatctgtttacccttaccggatatagtggttatgatccggaggtgaacatcgctaccggtttgacaccgaacattgattataaccgttatccgcgtagccgtacctatacatttggtgcacagttgactttttaattgaaatctataaaatgaaagaacaatgaataagaaactaatatactcactcattgccggaactatgttcactttgacgtcttgcgatgattttcttgatgtgcagcccgcctccggctttactcccgagtacatattttccagcgaatcggagatgaaagcgttgatgacccgtatctactcttccatgacggaagacggattgtacggaagtaaccttgccagcggtttgaatacgaataccgatgtggaaatgagttcgttcaagaacaacactgtcagtaccaatggctcggatataggctgctttgattcccgtcccacctggtcggtattgaacgctacttggaacaatatctattatgctatcaattatgccaacgactttttgcaggctgtgcaggagtcaccattgttttccgataaagtaacaggtgatactccttccgaaacacaacagatgtatggagaagtgaaaactcttcgtgccatgctctatctggacttgatccgtacatggggagatgtagtgtttattatcaaaccaacggaagcgaccgatgacttcttcagcctgggtactaccgaccgcaatgtcattctggaatatctgattgatgacttgatagctgtagaaccgatgatgaaatatgcagtcgatttggattatggcgtagaacgtgcttcacgcgaatattgccagtcgcttatcggacagttggctctctatcggggtggttggactcttcgtgccgacaaagaagatgtgactcacgtaggttacatggaacgaggtgataactttgaacattattatgagattgccatcacttatctggggaaggtaatcaaagaaagcaaacacgacttgactcaaagttttgaaaacttgtgggtaaatgaatgtaactggaagactgccaacaacgatgatgtcatgttcgctgttccgatgctgaaaagtgtcaccagtcgttatggctataatatcggtgttactattgcagaaggtaagcactcttatggcagcgcccgcaactatgtaactttctgcggtacgtatgtttattcgtttgataaggatgatttgcgtcgtgatatgacttgtgtaccttataaatatgataaagacctgaatcaggagattgatatgggagtgactggtatgggtgttggtaaatggtccaaactctatatgcagtctccgctgggtgcttccagtggttctaatacaggtatcaacagtgtacgtatgcgttttgcagatgttttgctgatgtatgctgaagcagtcaatgaactttacggaccgcgtgacgatgccaaagaagcactgaagcgtgttcgccgccgtgctttcgatgcggctcaatggacggataaagtagaaagttatgtagagagcctgactaatgaagcagatttcttccaagcagtcatggatgagcgtaaatgggagtttggtggtgaaggtattcgtaaatacgatcttgcgcgttggaataaatatggtgaagttatctacaatctttataacgagatgactaattggggattggtagctaacggagcttacgtaccaggcattgagaaagtaccgtctaatatctattacaagcaagtgacggaccctgaacattctgatagaaaggtattagacattgtaggtattgacgaatatggtcccggtgtaggtcgccctgccggttacacagtattggagtatgcgttgggatggagagtgttgaacaaagaaacacagctttatgaaacgttggatgctatttcatggagtttccgtggatttatcaacaagaacaacgatcaattagtgaaacctaccgatcctgtgagatacctgtgtccttatcctgcaaaggttataacagaccatcgcggattgattcggaactattatggatactaatcagtaaaaagacaaacgttatgataaagttattacgaaaacttgcaacggctatgctgcccgcactcctttgcggcaccctgttcataggctgcgaggcagatgataaatatacgaaagtggacgacctgttccagccccggtttgtattggagaaaccggaggtgaaagcaaactctgtgacattggtatggtataaagtgaacgatgctatctcttatacggtacaactacatcaggatcaatattataccagcttgtttatggagatagaaaacactgatccttatgtgtttatcgatgatattccttacggaactactttctatattcgtgtacgcagtaatgctgccaacgctaccaacaactcgcaatggaaatacaccagtgcctctactgaagctcgtccggaatatgcccaactggtggaagatgtttccaaaaccgaaattacggaatcatcggctatcattcgctggaagaaagacaataaacagaatccggtggatagtataagcattatccctatgatgaatacgacactgcctggtattagccgctatctgaccattgaagaaatgatgcagggatttgccgaggtggatggtttaacgaagaatacactgtatgctgtcaacctgtatgataccagtaaacctcgtaaatatgacaaaccttacaatcaggtaacgttccgcacggctggtccgtcggccatgtctatacaagttggcttggaagatgatttatctgccatgttattggacaacgatgtcgatcctgaagtgcccgaaggtacggaatactacttgccggcaggttcttcctaccgtgtcactccgttctctttgatgaagggtttccgtttggcgggcagtcgtgacggtgttaaacctgttgttgtcctcgaaggcagttggagcattgcagaaggttcttatctttccagcttagagttcgataatatcgaattccgtcatgaagcaaacaataattactttatgaataccagcaaggcatacacaatagagaatgtcagctttgtaaattgcgactttataagtcttcgtcgtggtttctggcgtcatcaatcagctaatgccaagtacattatgaatctggaaatggaaggatgccgtttcgaaggttgtggatggcaaacaagtgcgtatggtacatttaatcttcagtctttcgataaagataacggagtgtcttatgatcaggtagaccgtgccatcttccgcaactgtacgtttagcaacgacaatgatggaaccaatggctatggctggggtaaccttttctatgcgccttatatggataaaccgatcgaactggaatataagaatgtgactatctacaattacagccgtaaccaacgtctgattaacattgaatctgccgtaggttccaaattggtaatgcagggcatcctgttggcatctccttgcggtgatttgtatgctatcggtgctaatactaccactactttctctgataactataccacagcggattatgcattgggcggtagcaaaatgaatgcgacagatctcgagattacagcggacaaactgtttgccgatccggttaatggagacttgacgattaaagatacttcttccccgatagtaaacagtcgtgccggtgatactcgttggttgccttaaatttaaattgagaatatgaacttatatgattaagaataaattaaaagataatattatgaatctgaaacatctatttttcttagcggttgccggaacgttggcagtagcttgtagtgaagttaatgaaaattctcttactgatggcgatggtcaaagaatgcttcgcactatcagttcgggcaacgatcgtttcactacacgattgaatagcgaaaccagtgaatgggagaacggtgatgctatcggtatatatatgttcgatacagaagataagaatgtattgaacgatgcccttaacgtgaaatatacgacgattggcgaggggcttacggcgaacttctcgtccgatcccggaatagcaatctatgatatgcctacgaatttcgtagcctattatccgcatactacatctgcagatgttattgatgctacggcagcactttataaagtagatgtaagcgatcagtctaacggtatctctgcccacgatttaatgtgggcaaaggctgccaaccagtctacagaatcattgttggcaggtggattatcattcactttccatcatcagttagtgcttctacgtgtcaagattacgaatgaaaacgtatcaaatgtaacaagtataacagtaggggggatgaacaccacagctatttttagcctgatagacggtaaattgactaacatggatacacagaagtctatttccctgcaaaaaacaggagataaatcttttattggtatcatgttgcctactgaagagttgataaataaaatgtcgctcactatcatggcagacggtggtaagtatcagtacacagtgcctgaaggcagcaagatagacaagtttgttgcgggcaatgagtataccttcaatatcaatgtaggaaaagagactagtggggaaataggcggtggctccggcagtaacacaccttggggtgatggtggcagcgaagacggcgacggtgataaagtttcagagaatgaagcaatccctgctgattatgctcaaaaagcgattaatgcagaaacaaacctgtcgacaatattgtccggtgcttccggtaaagttgcgttagtatttgctgccaatgcagaagcttatacctttagcgatgcaatagtagtgcccgaagctgtaacagagttgttgctgattggtgatacagaaaaacaagtgaagatgaatctgaaacagatacaatataccagtcttcaaaagatagcattgaataacctggatattacaggtgataactcaaccgctctgctgactaacaatgaaactgcccaacttgctactgatgctgtagtagactttaagaagtgtaactttagtaatatgaagactgtttgtgactggccaaccagaaatgacggagtacaaaacttactttctgccgtactcatcaacaattgtctatttgaaaacatggaaagtattttcaattattacggctctaaagcaattactataaccaactctacactttataaaatgacagaacgtgccgtttatgtaaaagatgccaatggtgtggttatcactgtagaaaattgtacattagcagatttgggcaagactccttttgaaagtcaatatggtaacggcaatctctactataagaataatatttcagcctgcttcgttacaagtaaccctaacataggctataaaatggatgtacgggaattctccggtaactatgcagcggcagctaccgaagccggacagctgcctgtattgaatgtacatggaaaagcaattgatgccaatactttccctaatgcctggatagatacgtccaaaacagttaccgaactgtttgaagatgcaggaaacggcaacttcaaactgaaaattgatgctcaagtaggtgacccgcgttggtataagaatgtaaaataaccattgaattactcttgtaatactgattaaacattacagttatgaaattatttcattcattattatatcccttgttaggtggtttgttttgcctctcttgttcggatgatgagcaagattcaggtacaaaacaacctactactgcgggagaggttaccttcggtgtagacctcacaggtttctcaacccgtgtcacccaagacggatcgtcatggaatgacggagataagatcggaacatacgtattggatatgaagactcttgaacctgtcacagaagcagcgaatgtaccttatgtctgctcggaagagggtgcgtcggtttctttcacttccactacaccgctgaaagtgcaaaatgatggaacaccggtgaagtttgtggcatactatccgtataatgccgatgtacgtaattttaattatcccgtgcaactggccgctcaagaaagaggaagtacggcgtgcgacttactatatgctgccacgaaagaagaatacacctactctccggagaacgaaccccatatctcattaaactttacccatcgtctggcaaaagtgattctgaaatttgtgaatatggaaaaagaaccgttggaagtaagtgatgtacggattgaggggatgcaaactgccgcttcattcaatatacaaacagatgtactgacggttgacgaaagctctgttgctacaatcaacccttatcacaatgctacaacaggattctacgaagctatcattcttccatcggcattgacagacagctataaagtgtctttcgtattggacgatagagagaaagagtggatatttactaatttggacattgctttgccgcaattccacaaaggttatagctacacattcgcactctacatagacgacagcggctttgtagaaatgggacgtcttgaaaatgtggaaggcggaaactcatcagctccctgggaagacggaagcagtgaggacggaacggccgaaggtgacaagactcctgtatcaggatatgccttcacacctgccgacggcacgcagcaagcactagcagataccgaactgaaaatcgcctttgaaggcactgcacccgaacttggtacgagtggttgtatccgcatctatcgtatgagcgaccataaacaggtagatgaaatcaatatggcagaacgcagacagtctatcgtaaacggtcagacccaactgaatacgtggatggatattatcggcgttacgcctaccggttcttccgttagtcgtcgtatcgtcaattattatccggcacgggtggaaggtaagagcttcattatcaagcctcatcaacagcgcttacaacccgacaccgaatattatgtaaccatcgaacaggcagcagtgaaacaaacagacttcaagggagtatatggccgtgcatggacgttcaagacgaagccggcaccagcattgaccggaccgaactatgaggtgaaaattagtcacaccgaccccaatgctgacttctatactttgcaaggtgctattgacttctgtgccacacatgtcgatttgaatgctgctaagacattccggatggatgacggtatctatcaggagattatctacttgcgcgatcaaagcaacatcacagtaaaaggaaatgctagtgataatacggctgtcaatattcaatatgataacagcaatgatattaacggtggtataggcggcggaaccaatatcgatcagtttgcccctaccggcactattgtgccctcttccggaggtcgttcggtggtgatactcgatggtaacagtgataaaatccgctttgaaaatgtgacgatagagaatgcgtatggctggacactaggcaagaatggtcaggccgaggcactttatattaacaacaaatcggctgcttttatcaattgccgtgtcttgagtttccaggatactttgcttcccggtggaggttacaactggttcaaagattgtttcatagccggagctaccgatttcatctgggggtcgggtaaggtggtactgtttgaagattgtcagatccatgcacctagcggtacacgtgctgtaatgcaagcgcgtgtcagtgcgggttacttgggttatgtattcttgaacagccgtttcacggtaggcgaaggcgttactaactctactttgatttatcagtttgagccggacaatctgaccttcttaaactgtacgtttgccgatgtgtacggtcctaactttgtaggagagaataaaccgctgacaccggctgtacctactgttgccaccggctgcaaactttacaactgcaagactgaatcgggttctgatatttatcaatccattccggcaacggtgcgcaatacagtgctgcaacttagtaaggaacaatacgatcaatacttcggtacacgtgaaaccatcatgagttgggatggctataccgatgcggcttggttcaaataataaaatgtttaggtaaaaagatacgatgaatagattgaatcgaatgactggcttggtactggtcatcataggactattttgtgcttgtcagggtactgccaagcaggtggatgtggagacagatttgaaggcaatgtatgcagaccttcctttctccatgcccgccatagagcgtcctgtttttcccgattatcaggtaaatatctgtgatttcggagcaaaaagcgatggggtgacactgaacacggaggctattaataaggctatcaaagtagtgcacgacaaaggagggggtaaagtaatcattccggaaggtttgtggctcacaggccccattgttttgcaaagtaacgtcaatttgcatgcagaaaagaatgctttgattgtgtttagcggtgacacctcgttgtatccgattattacgacttcatttgaaggactggatacacggcgctgccagtcgcctatctcggcaatgaatgtagaaaacatagctattaccggttatggcgtttttgatggagcgggagacagatggcgtcctgtgaagaaggataaaatgacggacagacagtggaagaatctggtgaactccggtggtaatgtggatgagaacggcaaggtgtggtatcctaatgaaggggcattgaaagcatccgttctcatgtctggccaggggaatcaacaggctgaaatcacgagtgaagaatgggaggagatgaaaagttggctgcgtcctgtactgctaagtattgtgaagagtaaaaaggtgcttctggaaggcgtgactttcaaaaactctccgagctggtgtcttcatccgctttcgtgcgaatctttgatattgaatgatgtaaaggtgttcaatccctggtattcgcagaacggagacgcgctcgatgtggaatcatgcaagaatgtgctgattgctaactgtttctttgatgcgggagatgatgcaatctgcctgaagtctggtaaagacgaagatggccgtcgcagaggtgaaccttgtgagaatgtgattgtgagaaacaataccgttttgcatggtcatggcggattcgtaattggtagtgagatgtccggaggagtgaagaatgtatatgtgtccgaatgttcttttatcggcacggatgtcgggttgcggtttaaaagtgcccgtggacgtggtggcgtcgtggagaatatttacatcaataatataaatatgattgatattcctaatgatgctttgattgccgatttatattatgcggccaaaagtgctcccggtgaaccgattccgagtgtgagtgaagagactcctgcttttaggaacatctatatctcggatgtgttttgcaggggagcaggacgggcggcgtatctgaacggacttcccgaaatgccgattgagaatatttccatcaagaatatggtggttactggtgctaaagagggtattgtagtgaatcaagtggcaaagctcaacatcgagaatgttgaaattgacactcctgaccaatctatgatacagatcgaaaatacaacggatatcaccattaacggaaaagatctgggaacgatttcagagaaacggttactgaccaagaactaactgtactatctgttttatactgtttttattgtcaatctgtcaggacggtagttaaagaagtgaattacagtataatacatgctgacaatagaagctgacaataggctgacaataagaattaagagttctattgtcagcctgtttttttatcgtatagttatgctgacatcttggaattgttgttttaaggttctgatatagttgcattcgtatgcctgtacagttgagtaagtatgtctgtatagttgagtaagtatacctgtatagtttgattagtgtgccggtatagttgggcaaaggtgccgcagggaaaacgcattataaatcatgtaaaataagttcccataagaattcattatcccaccctgctattaatctttttctattgattggtatctctcttttgttgtttcttaatgtagccaatgcaattttcgccagtacggagaagtttaatgctgatatatttcttcttctggtattatcttcatggaaattgacatctagctgccaatgtagattattctcaatttcccagtgttctctactatttttaagtatcttctgcgcatcaggttccaaggaagatataaaacatcttttttccactgtagtgcctttgtttgtatttctggtattctctatatatccgaaagactgtatatttttccacttctttctaatatctgctcccagaaaaccaggatcgttgcagcaatagcagattctcgactcattcctgccatgtccttcttcatgcgtctcatatttgtcaaatcgtactgttgtaccttttgatacaatactttctgttactgacagtactatttcctttaatttcggttgattatctttcactataaaaatgtagtcaccttctccctttatgactttctctgcaattgtacgctggcatcctaaagcgtcaattgtaataatacaatcttttatacacaacatatctaataattcaggaatgacaactatctcattttccttttcttgtgtacataactgtccaagggagattcccagttctgttgcaaatgcactgatgacatgcaatttgtactttcccgtattcgaatcaggaagcactccttgtttacgatgacgcttgtcctgttcggattcataggctcctcgtatggttttaccatcaatggctatatgccccgaataacatttgagaatgctttggacccattgcctataagattcttcaaattttaaaggatctaatgccgagaaaaagcgattaaatgtatcatgggaagggataccattaaaattggaaagcttggctgcaaaaaaagattctttacttttaccaaagtcttctattgaattccaagtatcagcgccacatataacagcagaaattgcaataagaacaatggtactggcctgatgttttttacaacggtctatccggttatctatcaatattaatgaatcagcaaattcatgtaggttgctgatctcaatctttcttttagtttcttgcttcattttaattgtgatttataatcacgtaaatgtactcaaataatattgtaaatgaaagataaatatcttattaataagatgaaaagacaatattggtgtaagataaatgtataaaagattaaggaaagagtataatgcgttttccctgaaaggtgccgctatctttaccttcccacggccgtggtagcttcttctcacggccgtggtgagatactaccacagccgtggagagatctcgtcacggccgtgaagaactaacaagatcgatactttagcagaacgataacggcaccttagttgaacaataacggtgtctttgcggaataatgcaggcttggtaagtaagggataatagctgcatagtgcagttttaaacaataataggctgacaataaaagacggaaatctttattgtcagcctattgtcagcttctattgtcagtgggtaatagcttgaaaacaatcactttatgaagccataactcttggcctgacaataaaaaccattttttataaattctcaatgtagcctaagttcattaacccggcctcaaattgtatgtaatagcattgcctattgaatctgaatactgcacgtttgcaagtctttttcatttgaactgtttccgtaaagtatcttatatgttccgtttaaaggacgtatggtattggtcgctgcatcaaaccattcgaaagaatcgtacggaagctctatctggacgttctgtgtcttacctttagcaatgctaacccgttggaaaccacgaagagttttttgcggaccttctttgtcgtcaggacggcagatatacacttgaaccacttcttcaccgtctctctgcccgacgttacttaccgggatagtaaggattgctttttcgcctttggtcagcttcgattggttcagggtagctttcccataagagaaacgggtataacttaaaccgtagccgaatggataaagaggtgtttccgtcatgaaacggtaggtacgtcccttcatcgaataatcttcataatccggtaattgttgcatgcttttatagaaagtgataggcagacgtccggcaggattgtaatctccgaaaagaacatcggcaacggctgttccacctgcctgtccgggataccatgcttgcaggatagcatcgcaattctgcgtttcaggcacgatggccattgccgaaccggagaagttgacgaatactgttttctttccattcttctttagaagagcaagaacttctcgctggatggcgggcaattcgatttctgtacggtcgccgcctttgaatccggggtcggatacccgcatggattctccttccaataggggggagatacctccggcaaagataactacatctgcgctttgcaacttgttcaggatttcacgggcatccattggagtttgttttgccaagtcgaagttcagtgcagggttatctttaacctgaataaaacgcaactcgatgtcgtaactctttcctgcttcgtagttgaaagaatacagattggtatgattcttgatgttggtggcttctgctatttgcttgccgttgaggaataaagtaactcctccgttagtcatcacgcggaaagtggcggcaccggaatctgttgggcggaaagtggaacgatagatggcggtgaagtttttcaatcctacaccgggagcaaatacggtagaaccttctgcactgaaatggaaaggagtggtcagacggtcggttgcggcaatcttgcctttatattcgcggttattccagtaggtggcgttgaatccggcttctccgtcgatgctgcactgattgaataggctgtgcagggtggtgtcgtttgtatatccgcatacaggttcgtagatgatttgtgcgtcaggtagtttggcgcgtattccttccagtagagtaacggtatgtgaagggaagccgttgtagttaccccattgcattaccgagtcgttggcgttggggccgatgactgcgactttcatctgacggtttaatggaaggatgttgttattgttttggagtaataccagactttcgtgtgccattttcagtgccagttctttgtgtttgggacagtcgataacagaaaatggaatgttactccagggatgagtcgaattcatttctcccagttcaaagcgggctttcagtagtcttttgactgatgtattgattttctcttccgaaatcaggcctttttttcacagcatcggtgatgcttttgaagttaccgccacattcgagatctgttccgcttaaaacagcgtcggcagaggcatgggcggcatcgggatgcgtttcatgtttcttgcgttggaaaaagtctccgattgctccgcagtcggtgactacaattcctttgaatccccagtcgttgcggagaatttgggttaacagacggttgctgccgcagcagggatcgccttcgaaacggttgtaagcgcacatcacttctttaactcctgctttttgtaccagttccttgaaagcaggaagataggtttcccataagtctctgggtgcaatgttttctgcgttgaagctgtgacggttccattcgggacccgagtgtacggcaaagtgtttggcgcaggcatgaagtttgtcatattcggcatcttccggtccttgcagacctctgactgccgccattcccatacgtccgcttaaataagggtcttcgccgtatgtttcctgtccccgtccccagcgggggtcgcggaagatattgacgttgggagtccacatggtcagtccctgataacgtttatattgtcctttttcattgaattggcggttcttggcgcgtgcttcgtcagatacggcatcaaagacttcgtataatagttcgtcgttgaaagaagcggccatacctatggcttgtggaaagacagtagccagtccggcgcgggcaacgccatgaagagcttcgttccaccattcatacggcttaatgccaagccggggaatagccggtgagttgttttgcatcaacgccactttttcttctaatgtgaggcgttgaagtaaatcatccgcccgttgttccacagtcagcttcgtgtcctgatagggatacttgtttggttgttgtgcctgtacatttaccccttgaattccgataagacaggcaatgatccattgctttttcattttctagttcttttggtttttagatttgagactgcaatagtacgtgcttttcattatttttgtggggaatatccggtagaaaaggaggatttcctatgcaaggcttatttggagccgataaatccatagacctgttcaaagataaaacattttgttgaatatagcataagctttgcaatgtaaatagatgataccgaaatgttgttttgatacttatatcagagatatgtcttgttgaaatttgagtatttaagagataattatagctggattacagatatttactacatttgcgaacgactggtagttcttctggttgtgtatagaatatccttttggtacattgtacgttggggatattctcgtttgtataagaaataatcgtaaataatgaatattggaggacataaatgaatagtgattataaagttggcgatttaatttatgatgcaaatatttatgatggaatgaataccagcatggatgatttgcaattttataagcggtggttacctaaaaacaaggatgcccgaatacttgagctttgctgtggaactggcagacttactcttcctattgcaaaggatggatatgatataagtggggttgattacactgcttcaatgctccatcaggctaagatgaaagctgccgaggctggactaagaatcaatttcattcaggcggatatcaggactctggatttacagaagaagtacgaccttatttttattccatttaattcgatccatcatttatatgagaatgaagatttatttaaggtacttcatgtcgttaaaaatcacctcaaagacggaggcttatttctgttggattgttttaatccgaatattcggtatatagttgaaggtgagaaagagcagcaggaaatagccacgtatacaactggcgatggaagagaagtctcgataaagcagacaatgcgatatgaaaataaaacccagattaatcggatcgaatggcattattttatcaatggtgaattcaattctattcaaaatctggatatgagaatgtttttccctcaagagttggattcatatttggaatggaatggttttagtattattcataaatatggaggatttgaagaagaagtatttaatggtgattcggaaaaacaggtgtttgtttgtcaatgtaagtttggatattgatgtgttgttgacaggcaaatctctttatcttgtatgaaaagtccctttatatcagtttactctatcgaatttcgattgatcgaataatgagacaaccgggtataaagggactttttattttcttatcaaagagttatttttttctctctttgtattctgacggggtaattcctatcactttcttgaagcacttgctgaaatatttcggatcgttgaaccccgtcatatatgctacctgggagaagttatattcgtcgctgtcaatcagttgtacggcacgtttgatacgtatttcccgtataaagtcaacaggtgtcagtccgacgattgattttaatttccggtagaagattgtacggctaagcatcaactgttctgcaaattcgtcaatcgttagttcggcattgtccatctgttcttccatgtatgccattacttttttcataaattgctcgtcgtatggagtaatctgtggttgtgaaggagtcagaggatcgggagaagaggtattctttccttccatcagcctattcatatagagttcctgcaatgctttgcgttgtcgtaacaaggaggctacacgggtctttagataagtagcactgaaaggtttggtgatataatcgtcaatgccttgttccaatccggcgatacggtcgtccagagaggccttggctgataatacaatgatggggatatggcaaatattgttgttctctttgatttgcctaatcatttctaaaccgtccatcaccggcatcataacatcgctgataataagatcgggcaggtcgtcaacagcatgttgcaatccctcttcaccattggaagctgtgattaccgtataattctccgacaaaatacttttcagaaaagcctttaactcttcattatcttctaccaccaatatggagaaaccatccgaattagtctcaaggtcttctttttcttccacctcttccggcgctttcatgctatcgacgggatgaggcgctgaactctgactatcattcaggataaattcgacctgtacatcctcctcgaaaatttcccgttgtaaaggcaagcttactgtaaaacggctgcctactccgggttgactatttactgtaatagtgccatgatgcatttccaccatctctttcacgagagacagcccgatgccggaagatggttgcagaatattctgttttaccaatgactcgaagcgttggaacaaggaatgttgcttttctactgcaattccgattccttcgtctgcaacctctatctctaccgtcttctctttcgttgtgatattgactgtaatcgacttgtcggcaggtgtatatttgaatgcattggaaagcagattgaagaatatcttttcaaacttgtctctatccacccagctatataccgactggatggtagaagtcagctgatagtttatgttcttttcttcagctatcagtttgaagctactcatcaccttttgcaaaagtggaatcaaatcggtctcttcaatcagtagtttcattttctgattctgaatcttgcggaaatccagaatctgattcatcagtcggagcatgcgctctgtgttctgatgtaccaaagtcaaatgctcacgggcggaaggagaaagcggctcattctctaatacctctgtcacagggctactgattaaagttagcggagtacgtaattcatgagatatgtcagtaaagaatcgcagtttgatatttgctaattgttgttccatatccactctgtgacgtaaccggtagatgtaaaataatacatatacgatgcttgccgtaaagagtatgaatagaatgaaatagagcagccatgcccagtaggtttcccaaaaggtggggagtacatgtatagatagagtccgtacattgtccacccagaccccgtcactgtttgttgactttatctgcaactgatatttgcctgcaggtaagttgatgtagctagcggaacggttattatctgcttcattccattcttcttctagtccttgcaggcgataggcatataaaatcccttttggattgacataatcaagtgcagcaaactggaaagttacattcctttgagagggctccagttccaattcttccagattgtcaatagagtgatcggtaaggtgtccttgaatcttgagtcccgtaaacacaataggagggacatagctactcttccgcatcttctccggagaaacttccagaaagcctttatcagttcctaagataatttggttgcgggcattgataataggaagagcttcggagaaattgaattcctgatagatggaacttaattcatagttctcaaaagtttctttggcaggatcgaatttggagagcgcaatctccgaaacaacccatagctgattctgtgtatcttcaatcattgatagtgccaaatcggaagccagcccgttgttcttgtcgtagtttctgaattggatattctcgttcagcagattgggagatatcactttatttacgcctccggtgaaactgatgatataagtggttttattcttgtctgtatagatatgcatgatatcgttggcactaagactgtttttatctcccggtctacggatattccggtagaatttaatctcttccaggcgttcgaagttgttcgagaatgtcagcagtccgttagtcgttcccactaaaatcactcctcccggagcttctgcaatattgcgtactttcataccgtaagctatgggatagtttcttaactcattattactatgaataaatgaaacttttccatctttagcttgtgccagcagatttaatccacccccataacatcctatccaaatatgattacgactgtcctgaaagatagcataaatgctattactgcttaaactataaggatcatttgtctggtgttcaaaatggtgaatagagtaatgatttgctcctgtctttttaagttggaaaagtccgatttctttagtccccaaccatatatttccatctttgtcttccagaatcgaatataccccattatagaacgattgtttttccttaatgatatttccttgtttggataagtaccccaccaggttaccatccggtgcgaatatctggatataattagatttcgatgctgtccatagacgtttattgctgtcttgcaggaatgcacgtgtttctgcctcgtaatcagtcaggttaaattgatagctctgtggaaagaaacatagtttctctacaccacgtgctgttgcaaaccaacagtttccctgattatccaatgtataagacctgactaacggactgaaaatagacttaggattattgatatccgtaagaagcggtttgagagttctttctttccggtcatagtagcaaaagtttccttccgtggggagtaaccataggtttttcgcattatcttcaaaaataagtttgcgacttttacgcccatgcttgataatctcatcttttggggtgaacagatgctctttttcattggtcacgaggttaagatggacaatgcccggatcttttgaaaaaatccagatatctcccaagtggtcttgatagacagattctacatcgttggaagtttgggtagctgtacggatgtctatttgctggaaactgttcttcaggatagaatacaaaatcactccattatccgttcccaaggccagcatatcttttcctatggtggtgacattgtttattttatgatgcggataaggaatatctacgaatttcagttttttagtgtggaagtcatatctggctaacttgtcattttctgcaatcagatagatcgtttcctttatttgggtgatgaactggaaaggaaagtcagtatccagtgttttctttcctatgatggaaacacctttgtctgtcaatatccattcatcttcttcagagtcttgataaatgttaaatatttgatatcctttcaggttgtggttggaagctgaataaagtgtgataccttctccttttttgcataattgttcgtccactctgaatgcatatccgctttcacagagaatccaggcaatccctttctccagcgaataaatgcgtgtaacattgttagtttgtttcgtggaaagttcaataggttggagaacatcaataaacttctcggtttccacatcaaaaaggcaggcttgtccatcgtaagtggggcaccatatatctccgtatttgctttctgaaatagttcccatgcgattactgccgaatgcatatttactctcttgcgaagttttatatgtcttaaaagtgtatccgtcaaacttgttaagcccgttccaggtactaaaccaaacaagccctttctgatcctgtaaaatgctcattacattaccttgagcgagaccgtcactcacggagaaatgtttaacttggcagataggttgagcagctatatcgatcgctattgttagaagaagaaataaagtatggagccgtttcatagtagttactttaatgtttatagcaaaaataaacaaaacaatgcagaatggaaagtccgataagtggtttgaacgaataatactcgttttttcctattttttcctcttcatcctatacagcattgatctctatgttgtgttttgaacaaaaataagagagtaatattagttaaaaaaatcctctttataatctgaataagattataaagaggataattttattgacaagagttgcatggggtatggtgagatgaaatcataattggggaataaattgcacaagactttcacaagtatcctcctgccaatgcctaaaatcatagcaaagctaattaaatagtttttcgaattgcaatatttattaatttatcttatggtatttatgaaatttttaatatattgaagatattttgtgccaactttccgtaactcgttgattttgcttatgtttgtaggtaaaataaagaatgaagtgaatgaatatgtctacacagctattatataatgatttccctacttttttacggaaatattttccttacaaagtacaaaagatttcattgaatgcaggtttcacttgccccaatcgtgatggtacaaaagggtggggtggatgtacttactgcaataaccagacttttaatccggattattgtcggacagagaaatctattgcaattcaattggaagaaggtaaatgcttttttgcccataaatatccggaaatgaaatatttggcctattttcaggcctacaccaatacatatgcggagttggaaggcttgaagcgtaagtatgaggaagcattggcggtggatggggtagtcgggctggtgattggtacgcgtcccgattgtatgccggaaagtttgttgcgttatctggaagatttgaacaaacatacgtttctcatggtagaatatgggatcgaaagcacttgtgatgaaaccttaaaacgcatcaatcgggggcatacttatgcagatacagtagaagctgtgtgtcagacagcggcctgtggtatcctgacaggtggacatatcatcctcggacttccgggagaaacacatgatacaatggtggcacatgccgaaattctttccgatctgcctttagctacacttaaaatccatcagttacagttgatccgtggtacgcgaatggcgcatgagtatgacgtaactcctgctggctttcatttgtttaacgaggttgaggaatatattgatctggtgattgattatgtagaacatctccgtcccgatatggttgtggaacgttttgtttcccaatctcctaaagatttattaatagctccggactggggattgaaaaattatgaatttgtagctcgtttacaaaaaagaatgaaagaaagaggtgcttatcaaggtaagaagtatagggattcggaaaaaaggattatttttgcaaacgataaacttaccacttaataaatagctgttttgcggagtatagaatagtggaagaaatatttaatggatttgaaagatggaaagtaaaacaagaattaaaggaaatgtccactatgtgggagtaaatgaccgtaacaagcacagatttgaagcgatgtggccattgccctatggagtttcatataactcttatctgattgatgatgaaatggtggcattggtagatacggtagatatctgttattttgaagtctacttgcgtaaaatcaagcaagtgattggagaacgtcccattaattatttgattataaatcatatggaaccggatcattcgggatctatccgattgattaaacaacattatccggaaattattatcgtgggtaataagcaaacattcggtatgattgaaggtttctatggggtaaccggtgaacaatatctggtaaaggacggtgatttcctcgctttaggacgtcacaaactgcgtttttatatgactccaatggtgcattggccggaaacgatgatgacttttgatgaaacggatggagttcttttctccggtgacggattcggatgttttggtactgtagatggcggattcctggatacccggatcaatgtcgataagtactggggagaaatggttcgttactactctaatatcgttggtaaatacggaagccccgtgcaaaaggctttgcagaaattaggtggacttcccatttctgccatttgttctactcacggacctgtatggacagagaatattgcaaaggtgatcggcatatatgatcgtttgagtcgttatgatgcggatgaaggtgttgttattgcctacggaagcatgtatggaaatacagagcagatggcggaagctattgctgaagagctttctgcacagggggttaagaatatcgttatgcataacgtaacaaagagtcatccttcttatatcatagcggatattttccgttataagggattgattatcggttctcctacgtatagtaatcagatatttccggaggtggaagcgctgctttcaaagattctgctgcgtgaggtgaagggacgctatttgggttacttcggttcttttgcatgggcaggtgctgcggtgaaacgtctggcggagtttgctgaaaagagtaaattcgaattgatcggtgatccggtggagatgaagcaggctatgaaagacctgacttatacccagtgcgaaaatctggcacgtgccatggcggaccgtttgaagaaagatcgttaaaacagtgaatgagataatttattaactaacctataaaataatcgacttatgagacttattattcagccggactaccagtccgtatctctgtgggctgcacattacgttgccgctaaaataaaagctgccaatccaacccccgagaaaccatttgtattgggctgtcccaccggatcatctcctctgggcatgtataaagctttgatcgacctgaataagaaaggaatcgtttccttccagaatgtggtaacattcaacatggacgaatatgtaggattgccgaaagaacatccggaaagctattattctttcatgtggaataactttttcggtcatatcgacattaaacccgagaatactaatattctgaatggtaacgctccggatctggatgcagaatgtgcacgttacgaagaaaagatcaagtcatacggtggcatcgacctgttcatgggtggtattggtcctgacggacatattgcattcaacgaaccgggatcttcattgacttcacgcactcgtcagaaaacgttaacaatggataccatcattgctaactcccgtttctttgataatgacatcaacaaagttcctaagacttctttgacagtgggagtaggtactgtgctttctgcaaaagaagtgatgattattgtaaatggtcataacaaagctcgtgctttgtatcatgcggtagaaggtgctatcacacagatgtggacaatcagtgcattgcaaatgcatgaaaagggtattatcgtttgtgatgatgctgctacagctgaattgaaagtgggtacttaccgttacttcaaagatatcgaatctgctcatttggatccggaatcattgattaagtaatttgtgatgaaataatagaaataagggctgcgcactgaaaatgtgacgcagcccttttaatttctgatactattatgtgaagattagattttggatgattgtctaacgagcaagtattttggctatttctgttgctgctactttatatccttcaccagtgaaatgaatgtaatcatttccataaagtccgtctttcatagttccgtccgcttcggtgaaccatttggtgggattgatatattcaactttctcgaatcggtgatgttgtaatatgtcatgaatcttatcacattgtgtgcgcactttactctgttgttccttaccggatggaaacagacctaaaagaatgatacgtgattcggggaattgcttccgtacttcattggctactgcgataattccttcagccgtgttttcaggactgtcttttccacttatcagattattaattccaatggcaatcactatgttttcagggtggcaactattgtagttatcataacggacacgccaaagcaggttttgcgtgcggtcgccggatatgccggcactttcccaattatcctttcctatggcattgtccatagcctctttgccgggcttgtaagtcacttcttttctgttacctccccaaccttgtgtgatggaatttcccaataacaacagttttaaatgtttcccattgagagtggcggttatgtcttttgctacgctgttccagtccgagttttgggtccatccggctgccgaacggaattcatttcccggtacaggatgcacacacatattttccgccctgttcgtagctttgaggatgaactgcacaataggctcgggattgttgagggagtgcgggtgatgatccactccaggcttatgaataatagtaattggtgcatgcaattcctccatacgttgttcgaaaatggctgtgttttcagcaaccgacaccacttgatcagcatcacctaccacgtgcaggatggggattccagcttttgccattgtcggtgcacagtctatcggattctttttccagttcaacgcttcagcttcgtttttaaaaccgtaagcattgagaagttgtttcgtatccatggcggaaccggcagatttaccttgtcccataggccaacttttgaagtccattacgggggcatctgcataaatacatgccactttttccgggttttgtgccgcccagttatagacaatcagcccgccacgactcatcccttcaagtgccactttcttgttgaatccggctttcaccattcgcttgtaaaaactattccagcgttgaacagctttatccgagccatataagtcggctacatcacagtaaacaatatgaaagccatgttccaataatgctatgtcagtctgtggctcatgcccccaaaagcgtgcacgaatcatccaaggttttcctatggcttcttttgcgggctctactacaaggcattttactccctcattctcaaattcatacccttggtgtccatggaagttgaatcgtttggcatcttgtattcccagtgatgtctgcagctttgttggagaagctgttgcttttacagcgagatattcatatatcttttgggccatgactcctgctccgatagaagaggggtgcagtttgtccggtagcataaccgaatcccactggtcgccgaagagattaaacagattgataatttccagttgatttttccaggccaattcttccaccgtggggcgtacctcgttttctatcagttgtgcattgatttccgaaccctccggcaggaaacaacggataggagtcaggagaataatacgtggatgtgatttcagattccgatatgtgtcaattaatgtctggtaattgtctttgaattcgtttttgtatttccagttttgcggtttggtatcgttagtacctaatttgattaatacaatatcgggctgatattccagagatgctttgtaggtatctgtttcggaatatgggtaatctcctttagacaatatagttcgaccagaggctccgaagtttttgacctcatacccatctcccagataagcttgaagttgtgccggatagcagttcatttcccggttggggatgaatgctccataagtaatactgtttcctatgcacgctacccgtatgggttcacttgcaaatgattggatagtaatgaatagacatacaagaaagatgtcgatgtgatttaattttttcatgatgaatatgatgattttggtttgttggggggataaccaatcgttgttttgctgtgtataaacgaactggcatgctactaataataaaacttatttattcacgttcctatcatatagcataccagttcgattcatttttcggcttttatacctcttccagccagcctttcccttgccggatgatttccagttcgtcgtcggtacatttcactacagtggaaggttctatacctccgatacctccgtcaatgaccagatcgacaatgtcaccgaacttctcatctatcagttcgggatctgtcatatattccaagtcctcatgctcttcgtagggcagagtggtcgtcataatgggagcatccagcaggcgtgcgatttcgcggattatattattatccggcatacggatacccacttctttccggttgcggaagattttgggtaaccggttggttccgttcaaaataaaggtgaatggccctggaagattatgcttcatcagcttgaatatattattgtctactttcgcatattcgctgatgctactcaagtcataacagatgatagacagattgttctttctagggtctatctctttgatccggcatatccgttctatagcacgttccttcaaaccatgacagccgatggcgtacatcgtatcagtgggatagataatcagtccgccgtcattcaggatgtcgatgattcgttgtaaatcctgcgggttattatttttgtcatatagcttcagaagcataattcattctccttctctcttatttgagtttcttttttaagaaatccagtgccttttctgctgctttctctgtcaccttttgtttgattgaatccttattggcggtagcggcagagtccagtcccagtttctgtccgagtttgctgatagcttcatcggctacagcctcgacagcttgattggccatgcttttagtatcgacgctgactttcggagaggtaaatgaacctccgatcttcaagtcaagagtcattagtttagagatattgcctacagatgccggcaacttcacttttccggagtagtcgatggtttgatcgaggcctgtgctaccggaaagattcaatgtgtagtctcccatcttgatatcgaacggtttggtttctacgcgtccgtctttgatggtgaaatccagtgtcatatctttcaccttcatgtctttcagacttggctgtttaacggcatcggctatttcgtcgattgctttcactccgctcaaactaagatcacgggtggaaaggctgccatcaccttgcattgtattcagtacagggctcatggttgcatccaaatctgtcagtatattaatacttccggagaaattacctttcaggttttcgaagataggagccatcttctgcaccatgtccaattctttgtaagcttgtgcgaaaccgatattggagagtttgaatccggctttcatttccggcttctttacgttggcagtggagtagtagccgttcatgaccacgttgccacccatggtgttcatggagaggtttttcatatccactttgccatcttttaccacaagcttgccgttcatattattgaaagacatcttatcgaataacacctgtttcaggttagcgtccatttggaagtcgatgttgcggggaacttccataatacccgtggcagctgtagctacggagtcggtagacgcagtttctgatgcagtcgcttcatccgcagaagcggccatgaagtcgttcagattgaaatagttggaacgaatattcaggtttcctttcaatgtagtacctttcaatgcgtaaccgatatagttttcaaaccgactgtcggctgtgatatcattctttccgatgttgacggttgtctcgctcaactggaggtatttcggggtgaaagtgaaaagagacttcttgatttctacgtccggcatatctttcattttgagtttcatacccgtcagtccgatagtacctgaagcttgcatacgttcgtattcctctttttcgatataggaaaggcgtcctgacatttgcatatcggcgtcaatggtaccgttcaactccatatctccaagtggatagacttgttttatcatacctaaattgagaatccctttagcttcagctttaaagtccggatcgctgatcggtgtttttacattagccgtcaggctaaacggatttccggcaagacggaaactgaaaggattgatattgaccgtcgtcaggtcgatatttcctcccgggttctggacgttggcactgatattgatttgatccactcctgccggtaaagccggatagcggaacatggcattcttgacttgcatatcaatgttgaatgcaggaacggtgtcgccttgcaagatacctttggccgttgcagtaagcgtagcggttccgtctgttttcagactggagaattccgttgcataaatggctggaatcagtgacaagatttccttaaacccgatatcgttcgtgttaagtttcaagtccatgtcgatagccggatctttcaaggctacccaaccgtcgatacctgcctgaatggcgttgaggcggatggtgttgtcttttaatgtgtatttgttattggcaaggtcggcatccacatccattgttgcggagatattggcattggctaggaaagggattccattcatcttgtaagtaagtgatttggtttccgcttccaacttcagagtagtgcggtcacttcctaagtctccggcgcagactgcgttaaagtcgcggatatcagcatacatcttcccttgttgatcgtcataaatcaggttcatgtttttgataacaaagcgttgtagcttcactttgaaaggagaagatgcttcttcttctgaaacaggagcttcggctgttgctgttgtatccggtttcataatatcccagttggcacgtccgtccggcaatacaatggcatgtaaacgtgtatcttcaataaatattttagaaatatcgtaaccgctatctccgaaaagagagaataagttgactgcggcagtaacttctccggcctgtacaagggtgtcgttggcaaattcaccagtaccttttaaccagaaatcctcgagagtgacagaagcctgtggaaagttacggaacaggctaatgttaaggttcttaaagtcaaattgtgcattaagcatcttgttgccttctgtttttacaatgtcggctatctttccctggaaggcgaaaggaagaaggaacatcagaatgatgatgactcctactgtgatagctgcgattttcaaaccttttttcatttgcttctattttaagagtttgagatattacaaagagcaaaactaataaaagtttttgatatagagggagaatcagttctttttctttcgtcttgatacgaaagaaaaggaaccaaaaagaaagaatcaaggctgcgtttttccgactactccggtgtttcctccggctaaagggcagaaactcgctacgctcaaacagtctgccctttttaacgccggagaaaccacctgcgcttgacgtcggaaaaacgaggccgggaggccatgcggggggcactgtttgatggagatattgtgtgtaggatgatttttatgtaagtgtgtagatgacaaagatggataggtgcggaggtcgggaagaataggctattttttctttctaagttcttctgcaattctccattgtaaggcggcttctccttctttcccgactttcaacagagcgtctccgaagagttcgtgtgcaccggcatgttccggtttcaggctggtggccttgtccaggtcggcaatggcaccttctgtgttttctgtttttagccggagctttccgcggttatagacagctttaaagtttgccggatagagggtgactgcaatgttgaagcagttttcagcatcgaaatactctttgttgttgaagagagcgattcctttgcgtatccaggcatccacataattagggtcgagactaagtgccttgtcgtagttggcgagggcggcacgtgagtcgtgtgcctgggtgatacattcgttacccattaatagatattcgtgagcatattggcggaggcgttcctgctgttcgcgcatttgctctttgagtttcttattctgctctttcaaggtgtttatgacaccaagtttacgtcggataaaacggcggggaacagatttctcaatatcatagcgggaatgaatggcgcggaaaaactgttccagacattcctccatgtctcctttgtcgaaagcgcgtgaagcagcagcgtattgcacgtcggcctgcgcttgtttcagagctttgtcgatagcctgccggtcgttgaaacgtccggcaaagtttacgatttcggggcggacgaagacgtcagcacggttaataggctttttgagctgaataccgtccagtgaggtacagcggcttagtgccacgtatgcttgtccacctgcaaatacaccacctgtgaagtcgatgactacacggctgaaagtcagtccctgactcttatggacagtgatggcccaagctaaccgaatgggatattgtgtgaagctacctaagacttcttcttctatttcttttgtcttttcgttgtagcgataacggatattgcgccatgattcacgctttacgtcacattcttttccatcgtcggtgataacgtagatggtttcttcttcctcatcaattccggcaatgacaccaatggtaccgtttacccacctgcggtcgaaatcatttttaataaagatgatttgtgcaccgggtttcagtacgagctcttgtgaggtgggtagactgctttcggggaaatctccttcgatgactccttcaaaagtaattgggtctccgggaagttccgccagtttcttttcgttgatagagtctaccgtgtctctacgggtggccagagtgatatacatatcagcttccgattcttctatctggcttccataacgggtgttcagtagttgcagatcagccgctccggctgtattgttccggatatggtcgaggacgccgacaaaaacggggtctgtttggcggtataccttttgaagttcgatggataccaggtctatctggccgaatactctggcagagaaaaaatagggtgtaggatagaagcggttcaatatttcccgttcgtcgttttttacgacgggctccagttggaatacgtcgcctaccaataacagttgttttcctccgaaaggttcgcgcagattatgagagtatacacgtaggattcggtcgatggcatcaatgatatccgcccttaccattgaaatctcgtcgatgatgaccagttctatttgttccaacagcttccggtgaggcttggtgtatttgaaaaaatcatggatacgaccacgctggagactcaagttcgggtcatccggcagcagcggatagaaagggagtttgaagaaactatgcatcgtacttcctccggcattgatagcagcgatgcctgtcggggcgagtacaacgtgtttctttttggtattttcgcagacgtaacgcaggaatgtagatttccctgtacccgctttcccggtcaggaaaaccgattgacgcgtatattgaatcaggttcagggcgtcttgaaacgctgcgttattggtgtctacgctcataatcagataataccaaaatgcttcattgccttgctgatgccatcctcgtcgatgggagctgtcacataatcggcagcggctttcacatcctctttggcttgtcccatggctactccgatggctgcatggcggagcatgctgatgtcatttcctccgtctccgaaagccatggtatcttcgagtttaatatcaaaatagcggattatttcatcaatgcccttttgcttggtgtctcctttggcggtcacatcggcaaatgcaggataccatcggcctatctcgcaggtaggaatagacggacggatttctttttcttcctcttccgtgataaagggtgtcatttggatgacttccttactggttgcctcctcgaaagatacagtcggaatcacattcacgtgcaggaaatcatagaatatctttttcaccatgtcattgggctggcaaacggaaatgttgtgttcctctacaaagatacagggaacgccttttttctcgcagaaatctcccatcgcttttacttcgtcctgggggatggcacttttatagattacctgttccccgacaaagcagtaagccccgttcatggtgatatatccatcaatcagattccggtcttgcaattcggagaggttgttgataatggctttcggacgtcccgtagcgataaatatcttcagtccttttgcacgggcggcttccagtgcctcaatggtagacgacgggatgcggtgagtttcaaaactgaccaatgttccgtctatatcaaaaaataatgctttcgtcataaattcttttttgaatggagtacaaaagtactatttttctatgtaaatagcaattaggagatttctcttatgctttttttaagtctctactcttatcgataggaacacaattatttaaaagtgcctaataaaatgattaattataataggttcctttattcttttgactaaaaaagtttcccaagcatggcatcaagtctttattcttctaacgaattctccttatacttctctccatagagttgctggtactccttttggaaacggtcataaacactttgtgcatacgctttttgtccaagtttcttgagtgcttttattttgaaagtcaatgccgtttcgctcattccgtcaaacgagaaaagcacgtcggacaatacgataacctttctgggttcattattcgcttctacgataggaagcagtttctcgatgatccggatgaaaagttcgtcatggttaattttgatattgccaaaccattcgtaatgtacaaaagtaggcagtaaggtgcctcgttgcagcaggccgataaatcagaatcctaattattaatgggatggcaattatgtttctttctgttttaataagacgggatattgcagaacttgataaaactaacagtctgtccggatattcccttggggagatttaatcgggctttaaaaatcttgaatcaatgaaactaataaaatatttatcctttatcccttttctagctcttctctgcttgatgacgggatgtgaaaatgacaaagatgtgtattacccttatgtcaatgttccgcttactacgcacaatccggtgctcgttgagggagaagtcctgcatatcggtattggtttggacggtgtgaattatcgtgtagagagtgataatgaggatgtggtgactgccgaggtggttggcaacgagatactgttgacaggcagtgacataggtagcaccatcgttcgcctttcggatgatagctacaatcgtgctctcatgacggttgaagtacgtaaacttcaggaactgacactcgaatcgctcccggagggagtggaagtattgcgtctggataatgacggtgttattcttcgtgaaatgaaaatactgaccggtaatggcggttataccgttaaatctctgaatgaaggggtagctactgtagcaatctccggcactacagtaactgttactgtggtaggtgacggtggtacaactattactgtgaccgaccaggaaaaggaaagccgttccatagatttatgggtaccgctcaatcttgacgacccgacgccacgtatttattgggatggttatcgtgccgatattaacacggccggagtttccagtaccggatcttatgcgacgccaaaagatatgtactggtatcaacaaaacggtgaagtgaaagatacatattatgtctactttaacggtggttgggcaaacaatttaaattgtgtgaatgctgccaaccgtaatccgaagtttgaaacgactatcaatgacactaagacttcgtatacagacaaagcagcctctgccgttaaactgaccgagtttattttggaaaaacgtatcggtacaggtccgacgagccatccgcatatctatttcatctctttaaaaacagaagatggtaagcgtggatttatagtgcatcgttggaatgaataataaagacaaataggttcttagttttttttcagggtatgaatatgagggtcggatgctgtattgctccggccctctatgttttgatagagcatacaaaattagaggctgcctttcggtaataccacgaaaacaactatctttgctaactgtttattatacacataacctaacaatattatgcagtatgaactataattttgatgaaataataaaccgtcatggtacagattctgtaaaatgggatgcagtagagaatcgttggggacgcaatgacctgattccaatgtgggtagctgatatggatttccgcacagctccttttgtcatagaggctttgaaaaaacgcctggagcatgaagtactcggatatacatttgcttgcaaagaatggtcggagtctattattaactgggtgaaggagcgccatggttgggcgattcgtgaagagatgttgactttcactcccggtattgttcgcggcttggcttttgtgatccactgctttacgcaaaaaggagataagataatggtaatgccccctgtttatcatcctttctttttagtcactcaaaagaatgaacgtgaagtggtattcagcccgttagtcctgaaagatgaacaatattatattgatttcaaccgcttccgtcaagatattcaaggatgcaaattgcttattctaagcaacccccataacccgggtggacgtgtatggaccaaagaggaactgtctcaaatagccgacatctgctatgaaagcggcacattggttatctctgacgagattcatgctgacttaaccctacctccatacaaacatcctacctttgctttgatttcagagaaggcacggatgaactctcttgtctttatgtctcccagcaaggcattcaacatgccgggattggctagttcttatgcaattattgagaacgacgaacttcgtcaccgtttccagacatatatggaagcaagcgagtttagcgaaggacatctctttgcttatttaagtgtagcagctgcttacagtcatggtacagaatggctggaccaagtggtagcatatattaaaggaaatgtggatttcactgaaacgtatttgaaagaacatattcctgctatcaagatgatccgtccgcaagcctcttacttgatctttctggattgccgcgcattgggactcaatcaggaagaactgaaccgtctttttgtagaaggtgctcatctggcgctgaatgatggaacaacattcggtaaggaaggcgagggatttatgcggttgaacgttgcttgtccgcgtgttacgctggaaaaagcattgaaacagttggagcaggctgtaatggatttaaaatagtcttttaagtccattccccggttcggaaataaaatcaatccattcaggggatgaagctatatttcctgtctcactcttgctttttactattaaattttgtatctttagtgcttctcatcttcccaaagacaggtaatcatattacaaagtgaccaatatcatcttataaggtgatattggtcactttgcaatgtgcctattgtcccattgtaacgggacgacttaccgactgcataaaaaactactaatctttgcactgaaaagtcttaagtacaagattgaaaaactagtttgttgcagtatgatgatatgacaatgcctcaactatggcatcacatttaccggaatcagccgtacctcactattcaagccggagggtaatggactccaatgtccataattggccggacgatagttcaaatcaacaatattgatttctttgaatttgcgccactgcactccctgcctgtctaattctgtaattcgattcgcagggagattcgtgacttctatctcgatgtggttttttccgggttttaagaactggcccacctttagttgataaggcactgcccatgcgcatcccgcttcctgtccgttgatgcggacacgggcactttcgcgtacatctcccaaatcaagaatccagtcgtcggcctgcaaagtcggcaattcgatgtctaaggaataaacaccggttcccatgttcgtttgggctgccggatgatcgatatgggtccatgaacaggggcgatctatatcaaatgttccttgaatttccggtttgctttcggcgaagtgtaacttccaaccatgatccagacgaagactgaaaggttgctctttgacatacttccacggtttggatgcctgcaaaggttgttgatatgtttgcagaatgaacgattcaccggattttaattgcagatagacttgtgtttttccgtttgcctgtcttaccttagcttcaccacattctccggtcatgggattgaagagagcggctgcggctgcattcgttcccaatgtgatccaaccgtccactcctttattttgcaaggaagagatgaaatagtggtgtcccgtatcattcactcttcggatcgcttgtagtccgaatttggttttcatttcttcgggagaaatattgcagctggccaatgtgcgtgcataatccgttcctgtgataatcttcccctttccgattggagtaacggttgtttccgagaaagaaacagccggaagttgccggagcgtacgctggtaactttggcgtttttgttccaactgaccgtatcccggtacatctgtcggataattttcgaggaatacgatagtagctccctgtttggccagttcataaagatgtgccaatacatcactcggcattaggtgtgcagcaggcactaccaatgctttgtagcccgttccgcctgaagtaaccaactgtccgtctttgaaacgtgtactgcgaataaagttatcggaaatataatccccgtcatacccgctgttgttgatgcgatggatagcgtcgataaacttaggagccagtttatccatgtggtgtatcgtgaataataacaatcgtcccggttgctcattccacatatcatataccggaagataaatcaggaaatcattatccggccgtcccatttgcagaaagctctggcaacgggtgatatagttgaagaacgaaggggcatcacgccaaatactgtttgtcggactcatattgatagaagcgtagaacaaccatccgggccattcggcttctttcggagaatacggagtgccgtggaaaaacatgtgattgactccggaaacaaacatcaaatccatatccggtttacattgcgacagggaagtacggaaatgctccgtcagccatgtaaatgtctcggaagaagtatacgtttttcctgcaatatgagctgccgaggaggcatatttcagcatagacaggtccgaatcattctttttggtcaatgagtcctgacgcaatccttcgatgtggaactgcgacagtccgaaaccttcacattccggaatatccacggaagcatagatatcaatcagattaccgggcgaaccatgtgcctgattacgggtgatactaccgtttttgtgtgcccagtctgtccattgatgactgaagttctccaataagaggtcggaaatggtttcccggtaatccgacacgatacgtctgctaacttccggacggtttttatccaggaattcggggaaatgttcttccagtttatacccccgtctacgagcgaactgttccaggaaatcatccgtccagtcagcttgataaacttcgtatgaatcgttgaagaaagtatgtggataacttgtcttgctacttttgaaagcacggtcaaagcgggaaagataattttttaccgccttttttgagagatgattcatcacatagccttctcctcccggagctgcccgtttcactttctgccttgtttttccgatgtaaagagcgatcactttccatttgccggcaggcgctttccattgcagtttgtcttttttgacgtgagcagtcaggttgatacatttgcctttctcatcatatgccatcacccggcttagtacagaaaatggttgttgcttgggatcggtcacattaatatcctgttcaatctctttgccgccctctatttcgtatgtctggaagatagccttggtagccgcatcttctatactaacttcaggtccgccaaaaggccatccggttccggtattcatatcaatctcaatacccgtacgttttccttccgtttgtgtatgcttaagcatttccatccagcggggagaaaggaactgaatttcattcgcgtcattgccttgcaccccatagataggagtaatttctactgctcccattccggtacgtgcgtattcttccagattatacgtcagattcttttcgtctacggcacttcccagccaccaccatctggcgccgggacgtgcttccaccggagtgtccggccattgttgtgcttgcattactccacctgcggcgagcaggcaaagaactatcaattctcttttattcatcattctttcggtgtgttatagtattctatattttctgcgtcatcagttacaaaaagcggtcgtccgtccggctgttcaaagtggaagcggatgccgtcgaaggtaatgttccgtgcgtggcggatataaaaccctttggcgggaatagtgccgaacatccagggttcggggtatactttctcctgttcgggcggaatacgtttgccatcctcttcgctatatcctcctttataatagaggtgaatattccgaaaagttacgtcctcaatacatgcacccggcactccgttgatgatagaagcataccggctgtcggcattccatacattgatatcgctgataagaatacgtttcatggtacctacaggagtaccttcaggactgcgcatacgtgcgcccaaccgaaggaaaataggcgcgttgactatatttctcattgtaatattactgattacaatatcttccagatgtcctccgtctaccgtttccaatgccaatccacggcaatgttcaaagatacagttcgtaatcgcaatattgcggaaacctccactactttctgtgccgagtttgatgcgtcccgtacggaaaccatgatcgggagcctgcggttcgtccaactgccaagtgccgtccattacactgcctttgtcaaagccgctgacataacaatcactgatcgtcacattttccgtatcttggaagcgtcctaatccataagaggctttcaatacaatggcatcatcccagggggagttcaccgtgcattggctgatacgtacgttccggcagcaatcaatatcaaagccatcccggttggtgtctactttcagattctgaatcgtcagatgatccactccggtagccaacagggcgaaatgcccgcaatgcagcatggataaatctttcagggtcacatttctgcaatctttcaggctgatagccttattgcctacccccggtaggcgactctcttcacgggtcaagcctttgccatagattaagccgggaccactgatcgtaatattctccagtccgattccccaaattaaagagtttttccaatggctgtgaccgaaatcctgatacttattatgttcattcggttcggcggtatcatatccttcctcttttccgggaaaggcggcaatgatacgggtgccctgttccaaatagatatgaatgttactttttaaccggatggaataacacgcatattctcccgcaggtagatatactgtgcctcctccggcctgtgcggccgcttcaatcgcacgattgatggcaggcgaatcaatcgttttcccatccgctttggctccgaagtccattacattataaatggctgcatgtagatagatgcaacctattaacagactgaataataaatagatccttttcattttttgtcgattttggcaaaaatatccggtaacatatagtagttgtaatccgctttttcattctgttcgtagaaacagaagtaaagccggaaaggcttgcttccttcgtttcgcgaagaagccggggagagactgcaacgtccggccagtacagggcggtcggttcgtttgcctgattcgtaaagcatcaggggagttgcatccttatgtccgtcactcaagcgaatatcatcggtaggagtgacagcctgcagcgtccgtaattgcatactttctccgtagtagcaagtgaaggcttgtccctccacgctgaatacattgatgtccgaatccggttggcaatcgccgaaactccaaaatagggcatcggcttccggagcagaggcgacttctacttccagaataaatccacgactatcgggcagtgctttccattggaaggacactccccgtatcttttctttaggctttagccagtggctttcatttccttttgatatacccaaccggaaagtgccggcaggtggcgtcagtgcttgtgcttgcgcatcaatgagcaagattcccagcagtacgatggtcaggagatgtcttaacatagttgaagttgatattactttgttcattctcttttagttcaatgacattcttttcttctgtctttaatgtgatttcagacaagttgaaattcttcgtatagcagattttgcccggtttgtcggtctgcgcttcgatggcataaagatagaaattttccagacgtaacgaatcattccatcccgaagcggagataaattcgtccacattttccgcttttacctttgatacgtagacattgcggaaacgcggataacctttttcgggaggcgttaccggagtcagcatgattctccagtgctccgggatttctttcccttcatactctttgggtaaagtgctgtaactgtaactggggttccagttcaagtccgccgccagcacgtgacggacgttttccgcttttacttcggtcatataaatgttttcgattgtccctccacggttcatggcgcttttcaaccgcagcacggcggaggtgccgattgcttccagattatatcccaatacattccgtatgctaccggaagtttcgcttccgcaggtgataagtccggcacctttgcgggcgatgcaattgcgtatgaccacattttccgtaggaaggttcacccgcagtccgtctgcatcccgtcccgatttgatacagatattatcatcgttacagtctacatcgcagttttcgaccaagatattgcaggaagaatcaatgtcgataccgtccgtgctcggaccgtgtccacctatattgttgttgatggtcaatccgtctatcgtgcaataatcggagtaaagaatctgacatccccaaaaaccggtacgcatcagggtaaatcctttcaatgtaatgtccgagctacgttctatgaggatgccccgtacccgtttgcagtcgtaatccacaatccagcgcaatccttttgcttcgtattctttccgcatttcccaatatttatcccaaaatacttttccccggcagtccagcgttccttctccgctgacggaagcgttcttttcattgacaatgttgataactgccgcgggccatgtcatctcgattcctgcaatccgcgaacggaattcgggataatgatgaatggatgggctggccagtaaagtcacccctttgtccagttgcaggttgacaccgctttttatgaacagtgcgccagtctgataatatcccggctggagaactaccgttcctccaccgctgacggcacaactgtcaattgctttctggatagcttccgtgctaagcaccgtgctgtctgctactgcgccaaaagaattagcggataaaattacatggtttccgggcatttgccggctgcctacactatcggcccatgacaaatccggttgttgcggtacttgcccccattcgaagctgttgtttcctgcctgtttaaccgttggggtggcgcaagctgctgtcaaaagtgtgcctgccaataggaacagggggaagatgcttttggttttcatatttatctaatgcctgattcttaatacttaatacctactacttatctcttaatttccgtccggtttttcaatttccgtgaatggtgattcgttccagtggaaaccatttacatcgtccggctgtgccggattataggacgggtctattttcaggtgtttagccagttccggtacggctttcttcattccttcaatcacacattgggctatttgataggctccgtatggattgaagtgggtgttatcctcaaaagctttggtctgtcccggataagtgcctgccggatagtgtacgaaagcacgtttcgacgtttctgttcccaaagcttcataaagcgtacgggtcatttcgttgaggtcgatcaacggaacattttctttagctgccagccagcgcatggcttccggataatcttcgtgtgtgtcacggatatgtccggttgcgtcgaaactccggcgttgggtgggagtgaccagtacggggtatgctccccgtgcacgagcttcatcaataaatgttttcaggctggtcataaaagagtaataagctcctttgcccggtcctttttgcttttggtcgttatgcccgaattccatgaaaagataatctcctttctttatctggctcaatgcttttttcaaacgtcctgcggcaataaacgtattggctgattcgcccgattccgcataattggcgatacaaacgtccgtaccgaaaaaatgaggtatcatttgtccccagcttgcccatggctcgttgtcctggtcgactacggtactgttaccgcatagaaaaacggtaatcaccgacggatcggcaggctcgatgctgatactctggcatacgggtgcatcgccgttaaattccagcgtcagtttatcgtcccagttcagtttggctttttcgcggggtttgatacgtacggattctttttcggaaatgcgggggttgcgtttgttgatgataaatgtttcatctacgaattgtccctttttagtagcgaggttatcaatgaacagtcggcgtgattcgcctcttactgttgtcacccctgcctgtttcttgcttcccaggcgaacggttacttgatagttaccgtccggcacgcggacagaaaagaagaagggtgccttgctgcctttttcgggagtagcgacgagatcatatccatatcccgtctcctcactgtagcggggagcatctgccaactggtatgtttgggctttctcctgtgcattgacacttgccgtagctaagagtagcaagcctatgatcgtagttttcatgtaaaatgatatttaatgtatattgtttatggaatttaggcacggattacacggatttcacggtttttagaattacgcttttataaagcaacagcgtaatccgtgtaattcgtgcctgataattcccatttagttaattttcggtttgagctcgtcaggagaatctttggtataagatttcacatctcccgccactttggtgaataatgcttgtatcagctccggagctatcttgtctgccggacggaaagcatccgaattcatataattcaggattgctttgtgcatctggcgggcaacgattcgtttttccggttgggaagtaatgtccatactggtcatcatcaatttaccgttcaagacctttgcttcgaacaacatgccgattttccggctgataaaccaagtatcaatactttgaaccgttggctggaatgttgccgggaagtcggtgaattgcatcacctgcgctttgttcagcagttcccaccattgaaggttactatgatattcggtagggaattcgcggaaaagagggtgatattcattcaggaaaataccggttgtgtgcggcggacgcatcttgaaccaggaagtattccagaatacgggagtgaagtattgtttgacttctttgccgtattgtatctttccggcagccgtaatcagcacatttcctccgtcttgtaacacagccaatgccttggcgtccaaggtgtcggtggtatatactgttccttgtaccagttccacttgtgccggatatacccagaaatcccagtcgtttacggcatcacagccttcgatacgtacttccagatttagtttctgcggtgtatcgattccttccagagtcatatctacactacccagagaataaagatttccgatgggaatgtgatgggtgccgacagttccatgagcatatacttttccgaatttatccttaatggtatatactgtttttgcactttctaagggagcagctccgaaatgagatacttcaatgtcggcatggaatgtttcattgttggcatatacaaatttaggaatacgtgccaaaagtacggtcggactgcaaaagcgtctgaactgttctgcgttgatatatcctttttcttcaaagaacacgtccagtacaccgactaatgcagttccctggccggaataatcattgagagccagcaactggaatcccgcatagtccggagtacgcaaggtcttttcaatctcatgtttgtagcagagtgcctgcaatttgcccgaagccatcataaagtcgtgactctggcttcccatgtggttatcgttcagaatatcccggaagatttcaaagttcttcgctttgttgactccggtatatttacggatctcattgaaattcgggaatacgcaccattgacctgtttcgtgtgatacatacggttgtttcaccgtgtcgattcttgcacgataatccgattcactttccggttgcgcacctgcccaactaagtccgcgtgcgccggctttcacatgatactcattgtgaggttgccattgccagctgtttccaacggaggctcctgtgtatacacgacgcggatcggtcgctttccaataatccacgaacttgctgacccatgccacccaacgaccggaaggttcattgccgcaagccagcatgcagtaagaagcgtaattcccatattccttggtcagtgcaatggtttcgtccatcaggtatttgtcaatcggttgtccgttacccagtctcggaccgtggttcggccagctcggtccttccggttgcagatagaaaccgaccagatcggcagcgatgaaagctgcttccggcggacagaaagagtggaagcgcatgtgattcaggccatagttacgacaaatgcggaacacccgttcccaagaagctacatccatcggcgcatagcctgtcaatgggaagtcacagttttccaccgtaccgcgaagcatcgttttgcgaccatttacatagaaccatttcccttctatcttgaaatcacgcataccgaactgtacttgttgtgtgtcagtttgcttgccgttggttaattttgccgtcagtttataaagtgccggactgaattcatcccacgtcagaaactcttttcccatcggaagttccatttccaccggattatctcccggacggatgttgaaactttgatgtacgggagccactttgtgctgaatgtccgtgttaaagctcgcagcggaaagggtgatctctcccttggtggaagaagcagaccgtatattcatgcgaaccagcgctttctgattgctcaaatcgggatatacctgaatatcttctaaatggactttaggagtagcttgtaattcgattcgtccgacgataccgttccagttaccttgtgtctggtcggtgatgctgtgagaatctggacctacgttgatttctttgattctattatcgatacggatggtaatcaggtacgtttttccgggggtggttgcagcagtcaggtcatagacatggggaacacaaagactgttttgcataccaagctcctgctgatttacccatacagtagtttcgatgtgcggacgttccagaaaaagagtgattctttctcctttccagtcagccggaattgtcactttcttttgataccaggccacacctacataatgtttgtcgggagtcagaaagaagggtagctttacttgtccctctatcttgtatttttccatatatgggttgaagtagtaagaactgtcgtagaggcttccggtccattgggtacggacggtcacttcatctcctttcagtttttcgggcatggagccgggcaggttgatagaatcgtcgagggattttttgaaccattgttccttgacgccggtatcttcccggtctatccggaaattccatttgccggataagctgaaagagtgattttgtcccgctacggtcagtatggagataaatacgatagcaatacttactaaaagtcgtttcatgatatatagagttgatatgtttttcattctttttaaaatctgccgctaaagtagagctttttaagggtttagtaaatagaaagatgtacagatacatagaatattgtatcaaaatggacatctaaaagcgttcgtgtacaaaactacatggatttgaaatattgtccatgctctttatctttgaggaggggcggagatgccttatctttgcaaggtaaactttttaatcttaataaggaaccatgaaaaaagtagtaatctggatagctctaagtctttggtcggtgatgacagtctttgccggtgagacagcttacctcttttcttattttatcaatgacagtaaagacggactgcatttagcatatagttatgatggattgaactggctgcctttacatggcggacgttcttatcttacccctgcggttggtaaagataaattaatgcgtgaccccagcatttgccagtcgccggacggaacttttcacatggtctggacttccagttggacggaccggattatcggatatgcctcttcacgcgatttggttcattggagtgagcaacaagcaatccctgtgatgatgcacgagccggatgcacataactgttgggctcccgaactgttttatgatgaaccttcacaaacctattatatcttttgggcaactacgattcccggccgtcacaaagaagtggctaccagtgaaagtgagaagggactgaatcatcgtatttattatgtaacaacgaaggattttcgtactttctcaaagacgaagatgttcttcaatccagatttcagtgtgattgatgccgctattgtgaaagacccgaagcgggaagacctgataatggtagtcaagaatgaaaattccaatccgccggaaaagaatttgcgtgtgacgcgtacaaagaagatagaaaaaggattcccgaccaaagtatcggcacctattacaggaaaatattgggcggaaggtccagctcctctttttgtaggtgatacgctttatgtctattttgataaataccgtgaccatcgttatggagctgttcgttctttggactatggtgaaacatgggaagatgtgtccgatcaggtcttttttccgagggggattcgtcatggaacggcgtttgcagtggatgcctccattgtggagtcactgattgccgaccggaactataatccgcttattcccgataatctggcggatccgtctgtctccaaatttggtgatacctattatctttatggcactaccgatctggattacggacttggacgtgccggaactcctgtcgtatggaaatcgaaagattttgtgaactggagtttcgaaggttcccatatcagcgggttcgactggtcgaaaggatatgactacacgaatgataaaggtgaaaagaaaaagggctatttccggtattgggcgcctggaaaagtgattgagcaggacggcaagttttatttatacgttacgtttgtgaaaccggatgacaagatgggaacttatgtacttgtagctgatcgcccggatggtcctttccattttactgcgggacaggggcttttgcctcccggagaagaaggaacagatagcccggctgtcgttgatgatattgacggagaaccttttattaatgacgatggttcaggatatatcttctggcgtcgccggaatgcgggacggctttctgcggacaggcttcatctggatggtgagccggtagctctggcaacagcccgccagggatattccgaaggtccggtgatgtttaagcgtaaaggtatctattactatatttatacgttgagtggtcatcagaattatgtcaatgcttatatgatgagccgcgagtctcctttgacgggttttgtaaagccggaggggaacgacatttttttattctcttctcctgaaaatcaagtgtggggaccgggacatggcaacgtgttttatgacgagggaacggatgaatatatttttctctatctggaatacggagatggcggaactacccgtcaagtgtatgctaaccggatggaatttaatgacgatggaacgataaagacattaatccccgatatgcgtggtgtaggttatctggctgcttcccaagagacccggccgaatctggcattacagtcgcatttttatgcttccagtgagaaatctccccgtacttccgtggtcaatatcgaaacgcaacccaatcaaccgttgccggaaaaaggttcggtgaagagctatacccgcacgcatacttatcaggctacccatgtagctgacgaatcgaatggaacccgttggatggcggctgatacggatagcagtccgtttattacagtcgatttaaaggaaatccgtaaggtcggggagtgccagctctattttacccgtcctactgaaggacatacctggcgactggagaagtctatcgacggaaaacattggcagatgtgtgccgaacaagggaaagtacaagtatgctctccacatattgctaaggagataggagagacacgttatctccgtcttcatattcgtaggggagatgccggtttgtgggaatggaaaatatatgaataacgttttataacgctaataatcaatcgaatttatgaagtatatggtaaaaagtaaaattctggctactttctgtgccggtctattaaccgtttctaccggaatacaggcagcagagagactggcaaccggaactcaacagaagcaagctcaaaagactgtaattgaaacttctccctggtttgatgataaagacctgactttgacgggtgtctattattatcccgaacactgggatgagagccagtgggaacgtgacttcaagaaaatgcatgaattgggatttgaatttacccattttgccgagtttgcctgggcgcaactggaaccggaagagggacgctatgattttgcatggctggacagggctgtagctttggcagccaagtatgatttgaaagttatcatgtgtacttctactgccactcctcctgtatggatgagccggaaataccccgaaattctattgaagaatgaggatggaacgatacttgaccacggtgctcgccagcatgcttcatttgcttcgcctctttacagggaattatcatacaagatgattgaaaaactggcgcaacattatggcaatgactcccgtattatcggatggcaactcgacaacgaacctgctgtacagtttgattataatctgaaagcggagcttgctttccgtgattttctccgtgccaaatacaataatgacattcaacttttaaataatgcatggggcactgctttctggagtgaggtttattcgtcttttgatgaaataacgcttcccaagcgcgtacagatgtttatgaatcatcatcaaattttggattaccgccgttttgctgcatcacaaaccaatgatttcctgaacgaacaatgtctgttgataaagaaatatgcaaagaaccaatgggtgactacgaattatataccgaattatgatgaaggtcacattggtggtagcccctcgcttgattttcaaagttatacccgttatatggtatatggtgataatgaggggattggtcgtcgaggctaccgggtaggtaatccgttgcggatagcctgggcaaatgactttttccgtccgatacagggaacttatggtgtgatggaattacagccgggacaggtgaactggggcagtatcaatccccaacctcttccgggcgcagttcgtctgtggatgtggagtgtgtttgccggtggaagtgattttatctgcacctatcgttatcgccagcctctttacggcacggaacaatatcattacggaattgtcggcacggacggagtgactataactcccggtggaagagaatatgagacatttataaaggagattcgtgaacttcgtaaacatagctcttcccgtgaaaccaaacctgccgattaccttgcccgtcgtacagctattctttttaaccatgaaaactcctggagcattgagcgacagaaacagaaccggacatgggatacttttgcacacatcgaaaagtactatcgtaccctaaaatcattcggagctcctgtcgattttatttccgaagcaaagaacttgtccgattatccggtcgttattgcaccgacttatcaattagctgataaagaactggtagacaaatggatcacttatgtaaagaacggcggaaacctcattctgacttgtcgtacggcacagaaagaccgttatggtcgtcttccggaagctccctttggttctatgattactccgctgaccggaaatgaaatgaacttttatgatttgctgcttcccgaaaatcccggtactgttgttatggacggaaaagagtatatttggaatacatggggagagattctgaatcctccggcagatgctcaagtatgggctacttataaaaacgaattctatgaaggaagtccggctgtgactttccgcaaactggggaaaggtacgattacctatgtaggagtggacagccacaatggagcattggaaaaagatatattgaaaaagctatatgtacagctgaatatcccggtaatggatttgccttatggcgtgacaatggaataccggaatgggttgggaattgtattaaactattcagatcagccttataccttcaacttatcgaagggagccaaagcattgatcgggactacagagattcctacagcgggtgtatttgtgttttcagtgaaataagtgttgaaaagaattatgttacaattaaattatttattatgagactgttgaactattgttttttgattggaggaatattaattgcttcttgtgttggtaattcgagtaataaatctcaaaatgataagaaaataaatccggcggatactatttatttaggagatttacgtgaaaaatttgaaggagattctgtcttttttgcaaaagtggcaccggatctgatattgacagattatcaatatttctgggcggcaacagagtcagatgccatagccaatgggttaacaaaagattattataagaaagtaaaacaagaaattactgccacaaatgaagcaataaagaagggagtaatgaaaggcgctaatgtgaaacgaattcccgattttcagagtgtgaaatagctaagaatgttttatcttggtatgttggataatagagtaatgatatgattaaaagatattttctaagtttaataacttgtacttgtttttatttgttagccgcttcttttacttcgaaaaatggcaactatgaagtgcttaaagtaaccgctccttttccgatgcaacctattaaagtgtttatctatcctgataaggactttataattacagacttcggtgccgtcaatggaggaagagtagataatacaaaagcaattactagtgctattgaagcgtgtaaccaatccggtggcggacgtgttgttgttccggcaggtacatggctgaccggtcccattcattttaaaagtaatgtgaatctttatttggaggagaatgcggttttgaattttacggataatccttctgattatcttccggcagtgatgacttcatgggaaggcttggaatgttataattattcgccattactctatgcttttgaatgtgagaacgtggcgattacaggtaaagggactcttcagccgaagatggatacctggaaagtatggttcaaacgtcctcagtctcatttggaagcattgaaggagttgtatacaaaagcttcgactaatatccctgtgatcgaacgtcagatggcaataggggagaaccatcttcgtccgcatttgattcatttcaatcgttgcaagaatgttttattggatgggtttaagatttgtgaaagtccgttttggaccattcatctctatatgtgtgacgggggattagtgcgtaatctcgatgtaaaagcacacggacataataatgacggtattgattttgaaatgagccgtaactttttagtggaagattgctctttcgatcagggggatgatgcagtagtgattaaagccggacgtaatcaggatgcttggcggttgaatactccttgtgaaaacatcgttatccgtaattgtcagattctaaaaggacatactttacttggtatcggaagcgaaatatcgggaggaatacggaatatttatatgcatgactgtactgctccgaattctgtgatgcgccttttctttgtgaaaaccaatcatcgcagaggtggatttatagagaatgtttatatgaagaatgtaaaggcaggaacggctcaacgtgtactcgaaatagataccgaagtgttataccaatggaaagatctggtacctacttatgaagaacgaattactcgtattgatggtatttatatggataaggtgacttgtgaatcggcagatgctatttacgaactgaaaggtaactccaaacttccggctaagaatgtaatgattagggatgtaaaagtaggagaggtaaaggagttcgtgaagaaagtgaataatgtagagaatgtagtggaaaagaatgtgacttatgataggaaagggaaatgaccctttcctgaaagtagtagaaaatttcatgctataattttagtataatgtagtatcttagcagcaaaattgaaaactttatgctaagatgaagaaatccttttattattactgctaatcactctatatagcagtatcagctttgctcaaagcctgaaatctatatctattttaggcgattcgtattcaacatttgaaggatacctgcaacccgataccaatagcatttggtattatgtttctccgcgacagcaaacggatgtaacttccgtaaagcagacctggtggcataaattcatcaaagagaataactgccgcctttgtgtcaacaactccttttccggtgcaacgatttgtaataccggttataatcaggctgattattcggatcgttcttttattacccgtatggataagctgggatgtccggatatcatctttattttcggtgcaacgaatgattgttgggccggctcaccgcttggggattacaagtatgaagggtggaccaaggaagatttatatacattccgtccggctatggcatatctgcttgaccacatgattgatcgttatcctaatgttgaaatctactttctgctgaactctggtttaaaggaagagtttaatgaatcagtcagagctatctgcaatcactataacattgattgtattgaactgcatgatattgacaaaaagagcggtcatccttcgataaaggggatggagcagattagtgaacagattaagatgtttatgaggaagacgaagtgaaaaacaacggaaatataagaaataatattgccacttgctactctttgattaggaatactatttcaaagagtgccaagtggcaataagtttagttgtttatcttaatatcccggattctgcattgctttcttttcttcattgcttagtgcagaaccatttgaattggtgataccgtccaagaaggcttgggggatcggacgatagtaatgtttctccgatttgaattcgccaagacctctgctggcaccgtcgttgaatttatgccagcgggcgtctaacgtcttggtacgtgccagatcttcccagcgttgcaattcgccacaaagctcacgggtacgttcatttaataggaagcacatcattttgtcagcattggatgtacatcccagttcgttgtagataggagtgtcgactgtagagttataaacgtctgccacactatttaatttcatcgtagttttggtagaagcagtagtctcctgttcgatattgtttgactcataataggtgttttcttcccagtaaatagcaccttcggaggagtgaccgcctcctttcccggaacaataaggattattcttataagcttgtccaccatctacgttcttactacggtcttcaccagttttataaccggcacgttcacgtagtttgttcatccattcgacagctttgtcataattggcttcacctttacgaatatatgcttcggcaaccattagtacatcatctgccgaacgggcgatgatagcatcgcgagtaccgaattgagatgcgatggaaacacgataaccatcacggaatttagataaagctactgaacgcttgtgaggtatgatatcgtaataattacctgttttctcatttatattccagctgtgttcctgtcctttgaaatagcgtacatatgtatacgtgttacacatttttccatctttcaaaacagtatatgccggagcgttgggatatttctcatagcgattgtctcccgggtcattcacgatgtatttcataccgagttcacctccactgaaacgtttgtcaccttcttttacacctgccggagcgtatggcatatcttctgctgtccaggtgggagcacttttggtttcgttggctccataacaggtgatgaatgatttccagaaacgagagtcattgacacggtcaaatacctgcatggtatactctgtagcacttacgtatgagaattcacgtcctccggagatgtcacgtttacatccacctatatcattaccttggtatacggccggataataaagatgcatctggtttccataacgtccccatgttgattcatcattagagaattgagctgctagaatcacttcacttactttttcattggctccgttcggctgttcatagtcccaaagttctacataatcattacacaacggatgtgcgtctacaacttccgaaccatattgaataacagcatcgaggtcggatgctatataattactattccaatcgctgtacaattcggaggcacggaataaatgtgcttttgcaaggaaatgggcagcagcatatttgttaattcgtccgattgattcacctttatccggaagtagtctgtaggcttctccaaaatcagctataacctgtgtgtatatttcttcagcagaattccgtgtgaagtacgtttccgcgcttgtagacggaactaatttcaacggtacaccaccaaattgcttcactaattcaaaataagcataggctcttagaaagtgtgcttctcccaagcgtgtgttatatgtgggtgaactttggttataatattgaggtatgttttggatcaatatgtttgcgggttcaaccagtccgtagtaattgtcccagataggttggttagcggcattttcagatgaatttaaatcttgactatagtgattccatgctggaataacattattagcatcagtaaattcatccactcccatgttgtagcactgaatcccccatatatagttgaatttgaatttcagtttctgataggctccagtcactaattcatcaagaccttcttgtgtcttaaagcggtcggtactatgttgagttgttaaattctcatcaaggaaagattcactgcatgaagtgatcgagcttcctgttacgctggccattaaagctgcaaataatattctatttaatttcataatgtctttactttaatttgtttattagaatccgatgttgacacctattacaaaactcttcaaagtggtaggtgaaccaaatattttggtattattgtcataatttaccaagtctgtatccaaaaagtcacatgctttatagatattgaatggattcatggcttgaacatatagcttcaaattattgatacccaagttctttaattgttgtggggtaaagttataacccaatgagatattacgaactttgatgtacgagccatcctgatagttcattgcgctgttaaaggcatcggctccttcaccgttggaaccgggtgaatagtattttgcattctcattggtaccggctacccaatagtctattttacgttgcatatagcgaccgtcaagagtaacagctccctgtggaacagtaaatccccaacgtgataaaataaagaaggatagctcaaaattcttatagctgaaagtgttactccagccacctgtccagcgtggacgtgtatgccctacaattttcttatcgtcattggcatctattgtatcatcattatttaaatctttcactttgatttgtcccggtttacgtccgtatttggcagcttcttcagcttcttctgttttccagatgccatcatatacccagtcgtaataaacaccgatttcctcaccgacaaaccatttattgttcacatcttctgttctaccattagacaattcgtcgattctgtttctatccattgaccatgttaaagtagtgctccacgaaaaatcttttgtttgtataggtattgcatttacttgtaggtcaatgccatatccggatgttttacctacattggcataagtagaaacatagcccgttagtgaaggaattgacatttccagtaacaaatcatcagttttcgttttgtatgcatcgatactaccagtaagtcggttattaaagaaaccgtagtcaacaccgacattgtattgtgtagttctttcccagcctagagttggattagccattttggcgggttccttctgtgaaggatctgaaggtacatagcccaaggatgactcattctgtccccagttatagtataagcctgtgatagcgcctttagttgcatatgctttgattgccgcattacctgtaacacccatacctatacgaagtttcaactgattcagccaactgatgtctttcaggaaatcttcttgatccattctccatgcgatagcagcagaagggaaacttgcccatttgtgcccttcggctaattgagaggcgccgtcccaacgcatagatgctgtcaataagtacttatctttataaccatagtttagacgaatcatataagatgccatttgagtctcggtcagacctgtgccaaaagagtttagtgtaccggcagatcctatattataccagagctcatctgatgaggctacattagtagctctcatatctcccatctcgtaatggtaggcagaagcggattgcatcaatgtcatgcctaaattatgttgacccagggctttgttataatagatcaggttatccaatgtccatgcacgtttttgttcgttcttgtattgtgcgccattgttaccatctccattaataccatctgctgcattagcgactcctaaagtgtagaattggaattcaggaccaaactgaagacgataagataagccttccagtggtttccagattttaccgaaatcaatttgcgaatacaaactggcagaagcacggaaagtgcggcgttggttggtgttgtagtctaattcacgaatagggttgatgatatttacatccccactcggataacggacatattcaccgttttcgtcataaggtactgtccacggaatcatacttcttaatgcgctatagaaatcacccgaaccggttacagacttggagaaactatatccatagtcttgagtggaataagatgcattaattgaagatcccattttgaaccaattgacaggagtcacatcaaatgaggtttttaacgtataacgttcatatgcttgccctggttgtgtacctttctgatccaaataaccgaatgaggcatagccttggaatttgtcagaccctccggatgcacttaaggtatgttcgtgagtgatccccgtctgtttaccgtgcgaagcccagtcatatgatcctactaaagatggatcgtagactccatttacccatgctttttcgatgtttttccatgaagcagttacgctaccaaatgcagctttatcggcttcataagttggagtggcagaagcataagaacctgcattgtatttggctaagcgggcataatccaaccattcggcggcagacatcatttctgtaacatcgtgtagcgtttcaaaagtgacagtaccggaatagtttagggtcactttaccttcttttccttttttggtagttacaagaatcacaccgttggcaccacgtgagccataaatagctgtggctgaagcatcttttaaaatgtcaatagcttcaatgtcggaaggattgatattttcaatgcctccattttgaattaccataccgtctaccacatacagtggaccctgttccgcattaatagagcgttgtccacgaatattaatgttgcccacctctccgggacgctgactggatgtaatatctacaccggctgttttaccttgcatcccttctagtgcatttcttacaggcattgctttcagttctttttcacctacgcgagccatagcaccggttacgtcactttttttctgtactccatagcctacaactactacttcgtctaaggtctcggtatcttcttgaagagtaattttaaagttggtatttcctgctacggatacttcttgttttttatatcctatataagtgatagtgattgtacctttggttggtacattggaaagagaaaacttgccatttaaatcagtaattgtaccattagtagtaccattaaccaacacactggcaccaataaccggttctccggtaaaatctgtaactgtgcccgaaattgtcttattctgggcataagattctactattaaaaaggagaacaaagtgagaagaaatagccgtcggatagtatccttataggcatacaggtgattacctttttggttgcttttcatactttaattattaagttataaatattggtttatagatcctttattgttgatttatctttttatcctctaatgaagactctttgtttctttttatatggatattcctgtaacgtagtactttatagaggtttagtagtataatatattgtatgatattaatatatttacatagcgtatttattatagagttaaacaaaagttagattctctttttaaacataactacctgcgcatcaaacgactacatacagctagcaatcaattgaggataagatttgaacaattagtaccattaatatcttttttacctattatgagttatccggtatgcgaatctttcttcgttccactatagttatctttgcgtttgactatagttatccgcaagggtaactatagtgtactttgcggataactatagtggaacgaaaaaaggatagcgatcggaatgaaatcgattagcaaaagaaggaactaaaaatagcagtgaaaaactatctatactatagcaattggtcaagtacggcacggaacaccttatcggcatgttcttgcataatcttaatataattaaagataggacggttatttttcatactgtgtccgatacagtattctattttttcaatttgaatgcctaaatcatatccgtgttgtgcaaatgtctttcgggcggaatagtaagtaacctttttctttacccccgaaagttctgttaccttatttatatgtcggaagactaaactatatatttgtttataagatgaatatttaccaaactgcaaatgcccatttctcgacatatatttatctatgagcacttttgcttcaggctgcaaagtaaatacaatttcattttctcccttcttgctattacgtgttttgtgacgcacataacgcatatcgttcttatttttaaaatcatatactaataaatctctcaggttgataccgcctaaataataggtaagcataaaaatatctctcaccatggataaagaaggctttaaaagccggacatcacgtattctcttcagttcatctattgacaaatcaagttcccgcacattacttgccggcatcttaaagaggacaaaaggatgaatggagtaagatacataattcatcttaccggcataatttaatatcacctttatcaaagtcagatatattctgatagttgtatctgccagattctcctcgtgaagaactttggcaaattcttggatatgtataggtgtcaattgaattaaaggaaaatcccctttcatatatttgactaatctttcggaagctatcttataaagtttataagatttctcccgctcttctcctttcatgaaattcatgtattcttttgcaacagcttgaaaggttataccttttttcttttgttcataagtaattatacgtataagctcggtacatgaaattgctggtaaatagctgatcgatgtaataatttcttcatactcattgattagtttccgaagacaagcattcatattcgctgcattctcatgccttactactcgaccattttttagttgactggcagaatccaaagtaaattgggtagatatatatctggtttgagaatgatgtgctacggctatccttattcgatgtctgccatttgataattttttagttggaacaactacaattgaaaaattcgccatatcatttttaggtttataaattactattttccatacaataaaatagaaacaaaaaggttcatagtcattagggactaatcgaaaatcgctcccacagcatggaatatcgtgcaaaagacggtattttccatgcatttgtacgattctgcattgctatatcttgattaagtcgttatgtttgcaacactttttcacaggtagagtgtgaaaagttatgtttaaaaagagaatctaacttttgtttaacttaacagatataactaatgaatatggaaaacaacaaaaaaaaggcttcatttatttcaattactggttggaaaagaatgcagccattgtcttttttactttacgacgattttactaatcaacaaaaatatgtttaactttaaaaaacatggtatgaaaaaaaactatgtcacaactgctgttgccttactacttttagcaggatgtagcaacgatattaaagaaactgatattcagtttaccggtgatacgggagcgaaagtttcttttagtgcagtaataaacaatcatgaggctagcaatcttgttacaagagctacggaaacaaactgggaggcagaagactcggtaggaatcacttgtggtacggaacaagtgaatattcattacaaatacaagggcaatggtctttttgcagcaaaaggaggaaatgcagaagaaatttgggtattaggttccggagagtatgatgtagtggcatacgctccattttctggtacatcaggtgaagaacaacctgcattagaagtgactacagctagtgaaaatcaagctacagcagaagaacgtgcgaagatagattttctttttgccaaagggaaggctacatcacaaaccccgaacgtgacattagcattcaatcatgtgatgagtcgtattagattggagtttcaagctggcgaaggtgtggacttggcagatataacttgttatcttattgggcttaagaataatggtacatttaatcctaaaacaggggagacaacagtcagtgaagaccctgttacggataaagatgatatttattgggataaaataggagagcaggataattatacagtacaagctattttactgccacagaaggtgcaaggcaaagtaactatccaagctagaatgaacggttatctttatgaagccgagtttgctaacttgacagaattgaaatcaggattttcttataattacatcatcaagacaaataaatacgaggacaataattatgtgttgacaattacagaacaaacgcaaataataggatgggaggatgaaaaccacgatcctataacatccgacccgagtatagctgaaactggaacagagataactaatcctagttggaatattacagaagaaaccgtaactccacagcctgttgtgaagtgatctgtttaccaatctaatatagataaaaatgctaaaaatataaacatgagatttatgaaaatatataattatatatcaatgctttttctggctggcgcagccgtagttgcgtcttgctcgcaaaatgaagaactgaccggagaaaccccggattctttgcagggatttcagattagtgtgtctgatgaaggatttatggacgaaagtggtaagacacgtgctacagagaatggatatactacccgattttctaacggagatgctatcggtatatttgcggtaagaggagaaacggtggtagaggatatcaagaatcggaaattcacactgacagatggctattgggaattgactgatggaggggatcctattgaatacaaaggttcacaatttcagcggatgactttttatgcatactatccgtataatgcgaatgtgacttttgatccgacgaaggtggatccttttgaaacatacgtcaacaattggaaaataggcagtgaacaaaatgaaggaaattatacacaatatgatttgatgaccagtacgggtagtgttcagggggatcgtttgaaagggcagatcgcttttactatgcaacatcggatggctcttgcggtagtaaagatgcctaatttgacctatagctttacaaatggtggtatagatgattatctgttacctttggctgccggttcgtttacagtgaacaatactcaagcaactccttattatcaggaaagtacaaatacataccgttttttggttaatccgaataaggaattctccataaaggggacttatgtaggagtaagtgaaatggaatatgaagctaaaggtaccttggaaggaggaacagcgaagatgtataccatcgaagataagagtaagattaaccatactttgcaggtaggggattatttttgtgcggacggaaaaatagtttctgtagatgcggaggcggtgccggagaatgtgattggtattgtttgttatgtgggtaattcacagcccagtgtaacacatcccgaactttattctgctgagattgatgctttgcgtcgtgacttccccgcttgtacgcatgggatagtattatctacaaagaactcattggtaaaagatgatgaacaaaacgatattgccttgcaaatgtttcattctagtaaggctggttattactcagattggtttaattcagatgaagattggaaggataagtttgtaggttgtaacaccgagagggatgttaacaaaaatgatgcatcaaaggtttttcccgcattgatggggtataataacacaaaaatacttactatgtgttacgaaggaatgggtagtatatctacttgtgattatgtttatgactatatcatggcttatcgtaaggcagaagccgttccttctggtgtaactccttggtatctaccttctgtgatgtgctgggatcaggttgccaagaatatgagtggtattaatagtagtcttcagaaagtaaatggtgataagatggttacttctgatctacctgtaaataacaaggctgctgggcactattggagtagtacacagcgttctgcagtcaatcaatggacacatagcatgggaaatggaagctttcacgtcacttgtgaacgtgcttcatgcgccggctatttccgtatgatgctcgcattctaaaataaacatgacggtatataaagtccgtcaactatacttatatcatgaacatatacatatatgaataagaaaaactttataaaggggacaaccttacctgtcgctctgtttttcactatagcaacttttgcacctgcatggggattgcaaacagcttcggcagccatcgaagttgtacagcagcaaagtactataaaaggaacagtagtagatagccaaggcgaaccgataattggagcaagtgtacttgcggaaggaacatctaacggtacaattaccgacattgacggtgtatttagaataaatgtacgtcccggtactaaactgaaagtatcttttataggttatactgataaaacagttgtagcaaaaaatgatatgaaaatcatcctagtagaggatgtgactgctcttgaagaggtggagattgtagcttatggcacgcagaagaaagtgactatgacaggagctatcgccagtgtgaagggagaagaattgacccgtgtatctgtaggttcggtttccaatgtattaggagggcagatgacaggtttgactaccgtacaatattccggtgagccgggagcggatgccgctgaaatttttattcgtggtaaagctacttgggaaaattcttcaccgttaattcaggtagacggtgtggatcgtgaaagtatgagtgatatcgacccgaatgaaattgaatccatttctatcttgaaagatgcttcggcaacagccgtatttggtattcgtggagcaaacggggtcattttgattacaactaaacgaggaaaggaaggaaaggcgaaaatttcgtttactacttctgcttctgtattgatgcctacaaaaatggtagaacaggcaagttcctatgactatgcccgttttcataatcaaatgatgtccggtgatggcaaatctgccttatttagtgatggagtgattcaaaaatttgcagatggttccgatcctattcgtttcccaaatatacaatgggctgactatattatgaaaagctctacgcttcagagccagcataatctgaacatctcgggaggaacagataaagtacgttatttcatctctgcaggtgcttatacgcaaggaggactttttagtgagtttgatcttccttataatttaagctatcagtaccgtcggtttaactatcgtacaaacttggatatggatgtcactaaaacgactactttgtcattcaatattagtggtaatgtgaataattcagatcaaccgcgtacgagtcagggatcttccggattgattaaaaatatgtattatgctactcctttctccagtccgggaatcatagacggaaaattagtaaattcgagcgatgagacttattcggacgggctgaaattaccatttactggaggtacaggtatgggatattatggaaatggattcagccagaccagtaacaattcgctgaatgtagatgtgattctggatcaaaaaatggactttttgactaaaggactttcttttaaagtgaaaggatcttataacagctcatttacagttaataaagtaggttctggtgggtctattgctacatacactcctgtattgatggatgacggtagtattgcttatcgtaagtttggagagaatacggatgtgaagtattcgtatactacaggtaaagcgcgtaattggtatatggaagccagctttaattataatcgtacttttggtgatcatacagtgacagctttattcttatataatcaacagaaagaatattatccgaaagtatattcggacattcctcatggatatgtcggattagtcggacgtgtcacttatgattggaagagccgctatatggcagagtttaatgtggggtataacggttcggaaaactttgcgtccgatttgcgcttttcttatttcccggctggttctataggttgggtgatgagtgaagagaagtttttccgtcctttgaagtcggtggttagctttttgaaattacgtgccagtgtcggtttagtaggtaacgataatattgggggatcgcgatttatgtatatggctgatccatataatgtcggtttaggtgatttggcgaatcgtgtaacagcaagtggaggagcgactaacgcttggggatatggattcggtacagataatggtactgttagtctaggggcacgtgaggtagctaagaataatgctgctgtgacatgggaaaaagctctgaaacggaactatggtgttgatattaacttccttgatgaccgtctgaaaacaacctttgaatattataaagaacgtcgtaatgacatccttttgcgtgacggtacagctccgggaatgttagggttcattactccctattcaaatttaggaagtgtagacagttggggctgggaactttctttaaaatggaacgataagattggcgataatttccgttattgggcgggtattaacctttcttataatcagaatgagattcttgaaaagaaggaagccccgcagaataatttatatcaatatcagaagggacaccgtatcggttcgcgtagtcaatatgttttctggcgcttctatgatgaggatacacctgcactatatgagcagacatttaatcgtccgttccccactcacgagagtattcttcaaaatggagatgcagtatatgttgacttgaatggtgaccgtaagattgatgcaaatgatgcaagttatgactatggctttacagacgatcctgaatatatgctaggtattaatttaggattcagttggaagaatttggaaataagtactcaatggacaggggcctggaatgtaagtcgtatgatttcggatgtatttcgtcaaccgttttattcatcttccaatagcgagcagggaggattgttggcataccatttagatcatacatggacaccggaaaatccgtcacaatcttcggagtatccgagagctaccattgataatgcaaagaataattatgctacttccactttatatgagaaagatgccaaatacttgcgtttgaaaactcttcaggtggcatacaattttcacttcccattaatgaagaaacttggactgaatacatgtcagttggcttttgcaggatataatttgtggactattacaccttatttgtggggtgatccggaggcaagagctactaatgcaccttcttatccattgtccaagacttatacgttgagcttgaaattaggattctaaaatagataaaggaaagatacaatgaaattacaaaataaatggttcatcggtgcaatgttgggagcggcggtttgtttggtttccacttcatgtgtggacgaaattaaattcggaaactcttttttggataaggcaccgggcggaaatgctactattgacacagtgttcaatagtgcggaatatacgcgccaatttttgaatacctgttacagtagacagtattacggattaccttataatacggatagtaacggtaatattcctgattcttccagtccttatttaggaaagaaggatgcgctaacagactgctggtcactttattttagtgatgcgactgtatatcagcagtattatttgggttctctcaatgccaactatggcacgcgtggtaatattttcccatatacacgggaaatggtatgggaagtagtgcgttggtgttggttgctaatggaaaatatagatagagtgccgggtatggataatgctgaaaaaactcagttggtggcagaagctaaatgcttgattgcagcacgctattttgatatgttccgtcattatggaggtcttccattgttatatgcttcattcaccggtacggagtcaggttatgaaatcccccgtgctacggtagaggagactgttaactacatgataaagatgttggatgatgctatcaattccggcggattggtgtgggcttatgctgatgccgatcttgctagcaaggccggacactggacaaaggctggtgcgatggcattgaaatgcaaaatctggcaatttgccgcttctccgttgtttaacgatgtcaacggatatgcaggaggaacctcagaggctgaacagcaacgtctggtatggtacggtggctatcgtgcggagctttgggataactgtttgaaggcttgtgaagcattctttaaagagctggagagtcaaggcgggtatagcctgaataaggcttcggaagaaacaccggaacagtatcgtcaggcatatcgtatggggtatattcgtcagaacagcaaggaagtcttacattctgttcgcacgaatatgtcggacgctttcaactcaagttcttatatgtggcattcttgggctgttccgtcactttgccgcactgaatatccgcctacacaggaatatgtggagatgttcccatgggctgacggcactccgtttgactggaaaaaggcggaaacagaaggtaagttggatgaaatgttcttgaccggaacatttaaaaatggagaacaactattgtcggaaatcgtattaactcgtgaccctcgtctgtatgagcattgcatggtgaatggactaccgaagatgttagactggagtgccggaacgatgtccggtttaccttatgaattgtgggtcggaggatacgatgaaggacaaaatgcggcacttgaatctggtaactatgcgactggttataaaaatatgaaatattatttgggaactgagtaccaacgtcagtatacgcactgggtttatcttcgcttgtctgatatttatttgacttatgcggaggctttgcttcaagctaagaacgatcaccggggggctattaaccaaatgaatatagtacgtgcccgcgtgggattgaagaaagatttggcggagtgtgttacagataagaatttactttctgacaaagctgccttattggaagaattgctgtgtgaacgtgttcgggaattggggcttgaagatagccgtttctttgatcttgtccgttacaaacgtgccgatcgtttcgagaaacgtctgcatggattacttgcctatcgtttggatgatactggtaatcgcatgacaggtaatacaaaatggaatgaaggagataagaacaaaggagcattgcaacctactcgatttgaatatgaaaggtttgaattatctaaaccggttcgtcgttggtggacatacggatttgattccaaatggtatctttctccattcccgcaaacggaaattaacaaagggtatggattgattcagaatccgggttggtaatgtgagacaacgaaacagattaaaacaatacttgaatattgatttatatgagaaaaaataagattctgatactggctttactagtttgtttgagcattccggtcagagcgcagaatacagacaacaacattataggtattgttgttgataaatcgggaaacccagtctatggagcgtccgttaatgtggaaggtggcgcagtggagacccgggttgaaactgataaagatggtaaatttgagattgcggtcgagaagggacaacgcttgagtgtcttttctgccgacaaaggctctaccacagttgtggtaaaggctgatggtccgatgactattgtgatgggatatgcagctcagactattgatgtgggagctaaccggacattcaatcgtcatgaatcaacagcagctgtttctaccacctataatgaagagtttaataagcggtcttcccggaatatatccaattctttatatggatatggattgggtcttactactttgcagaatgcagctagtacaggtttaatggcagatcctaccttttatgtacgtggtttgcagagcttgtcaagtagtacgccgcttgtgctggttgacggtttggaacgagacatgagcttggtgagtccggaagaagtagaatccgtttccatcctgaaagatgctgcggctgtggcattgtacggatacaaaggagtgaatggtgcgatcttgattacgacgaagcgtggtaagtacaaaacaaaagagataacgtttacgtatgatcacatcattaacactcagtctcgacgtccggaatttgtagatgcggctacgtatgcttctgctgtgaatgaagcgcgtggatatgaaggtttgggagctcgatatactccggaagaagtcgacgctttccgtaatggagtaggcagtggaggagcttcccgtatgtatccttatctctatcctaatgtgaactggattgatgaaacctttaaagacagaggagtttctaataaatacacgatcgaattccgtggaggaggaacaaagttccgctactatactatggcgaatttattaacagacaaagggtttatcaagaccccgaatgcaaatgacggatattctacacagaatatgtattcacgtgctaatttgcgtacaaatctggatattgatttaacgggcactaccaaattgaagttaaatcttctcggaacattatccgaatctcggattccgggggcttcggttaacttatgggatatgatttattcgattccttctgcagcttttccggttcgtacggaagatggcagttggggaggaagtaccacttgggcgggcacgtcgaatcctgtcgcacaatcgcagggagctgcttattctaaaggacactctcgcagtttgtttgccgaccttactttatcacaagatttgtctggtttgctgaaaggattaggagctaactttcgtttagcttatgataactattccaatattttagaagaccatagcaagacttatacgtatgctggttatgcaacaagctggacaactaacgggccgttttatactgccatttcaggtggcgaatccagtgaaatgggttcgggtgcgggtattgacaattgggcgcgtcaatttaattttgcaggtagtgtagattataatcgttcattccaaaagtgggatgtgtattctcaattgaaatgggattatgaatatcgtgattcatacggtctgaacactactatttatcggcaaaatgtttcttggtataatcatgtaggtttctctaatcgctattatttggatctggcattggttggctcggcttccagtttattggcaccgggacataaatgggctttttctcctaccatttctgctgcttgggtactttcggaagaaaaatggttgaaagatgtgtcttgggtgaacttcttgaaattgcgagcttcatttggggtgatcaatgttgattatctgcctaaagacggaagtactaccgtatatgactattgggaccagatttatacgactaccggtacgcaatataagtttaacagtagttacgactctgaattcggaagtactattatcggtcgcttggcaactgctaattcgacacatgagaaagcgtataaatataatgttggtgttgatgctatgttgttcaatggattgaatgtgacggcagaaggctattatcaacggagaaaagatatttgggtttcttccgagggtaaatataccgatgtactgggagttgatgctccgttcgagaatgccggaatcgttgatagctatggtatggaactaggacttaactatacgaaaaggttaggagatgtagtgtttaatcttggcggtaattttgcttggaataagaatgaaattaaggaacaactggaagaaccgcgtttgtataagaatcttgtgcaaacaggaaatcggttgggtcaagtatatggaatggtagctgaaggtttcttcaaagataaagaagatatagcaaacagccttacacaaaactttactacggtagtgccgggagacataaaatataaagatgtgaatggagacggaatcattgatgctaatgacaaaactgctattggttatagtacgacagctccggaaatttattattctttccatttgggagccgaatggaaagggattggggtagatgtaatgtttcagggaacaggtaactattctgctttattgaatacgaagagtatgttttggccattgataaataatacgacactttctactcattattatgagaatcgttggacaccggaaaatcaaaatgccaaatatcctcgtttgagttcacagagtaatgccaataactatcaggctaatacggtttggttggcagaccggtcattcttgaagttgcgtaatgcggaggtgtattacagattcccgaaagaattgatgaagaagactaagatattggggagtgccaagttatatgttagaggaacagacttgttctgttcagatcacattgatgtggcagatccggaatgttatggtgtagcgactccgctgaataagagtgtagtagtcggtgttacgattggtttttaatcataaaaacaaagcgaaagaatgaaactgaaaaacattatctacggaatgatgtgtgtagtcacactcggttcctgctcagataagatggaatatcatgagtacaataactatgatgaggattttgtgaagctcaacttcggtaatgtgggagggctgataacaaatatctatttgtccatggatgtggactttggaaactatagcggggcaattcttggttctgctactgatgaggctgaatatgcttattcgggaaatcagattgaagacttttacaatggttcttggagtccgtcaaatgctaaaagtagtatgtggacgtcctgttatgaagggatagccaattgtaatttatatctggagaagtttaccggactgacatttcccgagttggctttgaacagtgattatgcacaacaaatgttccgttataccaattaccagtatgaggtgcgcttccttcgtgcatatttctactttaacttggtacgacaatatggagatgtgccgtttagcgaccatatattaacagccgaagaatcgaatacattgtcgcgcaggccggcacaggagatttttgattatatcatagccgaatgtgatgatataaaggataagattattgtcgattacagtaaactgggagatatggcattgcctagtagtccggcggaaacaggacgtgccaaccgtaaaacggtattggccttgaaagctcgtgctgcgttgtatgcggcaagtcctttgtttaacccgactgataataaagagctgtggtatcgtgcagctaaagccaataaggaaattttagatgacagtaatggatttgctgaaaaggcaaaactcttagtggaggattattcatcactttggagtaaggataattacaatgacgctactagtgaattgatttttctccgtcgtgccactactaccactaattcttttgagggatataacttcccggtagggttggaaaattgtaaaggtggaaactgtcccacacagacactggtggatgcgtatgagatgaaggatacagggttgcgcccggacgagttggataactacgatcctactaatccttattataccaaccgcgaccctcgtttctatctgactattgccaagaatggagacgaaaaatggcctaactggaatactgttcctctgcaaacctatcagggcggattaaatgcggaacctttgagtggcggaactccgacaggttattatctgaagaagtattgtcagacggcagtagacttgcgtgccggtacagcttcaaagacctatcattcatggattacgttccgttttggagagttctatttgaattatgcggaagctgtatataagtatctgggtagtccgtatgcaacggacagtgaatttacaacttcggctgtagatgctatcaaagtagttcgtacacgtgccggaatgcccggattccctcaagggatgaccaatgatgctttctggaagaaatatcagaatgaacgtatggtagaattggcttttgaaggacatcgtttttgggatgtacgtcgttggaaggagggggacaaacatttcaaaaacattgttgaaatgaaaattacgaaaaatggggatgatacttatacgtatgagcgtaaggtaaaagaaagaagttgggatgataagatgtatttcttcccgattcctcagagtgaaaaatcgaaaaatcctaatttggagcagaatccgggttggtaacttaaccggaatactgatgaatagaaataggatattcttgcatagaacggatgtttatagaataaaaaacgaaagaaatgaagatacattatataatattggggctgttttatttgctggctatagttgcttgctcagataatgaccccgtcgttgaagtgaacaatggcaatcaaacagaagaattgcctcctctgccgaccgaagtcataacgggtagccgcgccatgtgggtgagttatgatcctatttcggcttctgatcccaataacgcatcagggattgcatccgcattgattagctggagattattgaagaccgatccgtctaatgttgcttttgatatttataaatcagtagacggtgagatggaagtgaaattgaatgaagaacctatttcaaatacgacttcctgggtggatgcagatattgatgtatcaaaaacgaatgtatatcgggttactcttgctaatcaggctgaaacgctttgcgattatacatttacttctgaaatggcagaaaagttttatcatgaaattagattaaacatgaatgtacccgatgcatcgattacatattctcctgatgatattcagctaggtgacttggacggtgacggtgaattagagattgtggtgaagagagaaccgtatgatggtgccaaccaggggggatggaataatggttcgaccttgttggaagcttataagatggatggtacttttttgtggcaaattgatttgggaatcaatattcgttccggttcacattatacttcatatattttatacgattttgatggagatggtttatgtgaaatagctttccgctcttcagaaggtacaaagtttggggatggtaagggcattaccgatgcttatggtaatgtgaacgattatcgaattcgtcagactgacgctgtgggctggtattcgggagcaagtattaatacaatttgcggtttgataatggaaggtcccgaatatatctctatttgccgtggatatgatggacgtgaaattacccgggtggataatattcctcgtggtggaagtggttcaaaagcgtcgcgtgctaaatattggagtgaatattggggagatgattacggaaaccgcatggaccgtttctttatcggggtggcttatctggatggtatacctgacgaagcgaccggagtgagaacaagcaaccccagtctgatcatcagtagaggtatttatcataattggcaagtatgggcactcgatttgaaagggaataaactggaaacccgttggaagtttgatacagccgaacattcttcaaaatggttgtccatgtgttcgcatagttttcgtgtagcggacttggacgatgatggaaaagatgaaatcttgtatggttctgcggctatagatgatgatggaagcgaattgtggtgtaccggaaacggtcatggtgactgtttatgtgttggcaaatttataaaagaccgttcaggattgcaaattgttgcttcatttgaagaaccgggcaattataatggacaaggacacggttatggatgtcaagtgattgatgcaagagatggtggcttgattaccggccatggagcgggttcgactactgatgtcggtcgttgtattgtggcagatatcgatccggatagcccgaattttgagtactggtcttctttgcaggaaggggtattcagttgtagtggcagtggattggtatccagtacatatcctacaggtattggtggtggagttttgtataatgtagccatttattggagcgggcagccgacaagagaaatgctggaccgtgcttgtgtcgtgagctataaagagaaccctgatgtaaacaagacgaataagactcgtttggtatattttggaacttacggtagcaatgacggtaaccatagcaccaaatacaatccttgttactatggtgattttctcggtgactatcgtgaagaagtaataatgggttcaagtgacatgaaatctatttatatattctccacgaatcatcctaccgaattccgtcttcctcacttgatgaccgatcataattatgatatgtctcaagcgatgcagaatatgggatataaccagggaactaacttaggttactatgtaggtgctgaaactttgaaaaaagcagaataaaaaggtttttgaataagaaatctcttatttgatatgagtttgttgaaaaagaacaatccggctaactgtcgggttgttctttttttcatagttgaacgaatcgccatatatatggataatattctatttcttaattgatcggctctccctacctttgtaaggtgagatagcaaatatacatatgaaaaaactctttatccttttgttcctcttcatcactttaggaacaaacgcacaaaacaataaagtttccggcctcaacgcccgccagtttcataaatattggaaggtagagtcggaatctccggattataaagtgacatttcagggtgataccgctgaaatactatctcctaaaggccttaccttatggaggaaagaaaagatgagcgggcgggtaaccattgaatatgatgcgtgtgtagttgtagaaaaagaaggagaccgtttgagtgacctgaattgcttttggatggcttcggaccccaagcatcctgataatatatggaaacgtgagaagtggcgtagcggaatctttctgaattgttattctttgcaactctattacatgggatatggtggaaattataactctactacacgcttccgtcgttatgacggcaatgaagcaggaatcacagatcccaaagtacgtcctgccatattgaaagaatatacagataccgaacatttgctaaaagcgaatcactggtatcacattaagataacaaatgaaaataatagggttagttattacatagacggcaagcgactggtggacttccgcgatgccgaacctctgacagaaggatggttcggctttcgtaccaccttatcccgtacccgcattacaaacttccgctatgaatgtttgccgccccaaacgtctactgttcctttacattggatcggcaatactcctgaacaagacaaagctgtaagcttcggagttccttttgatgaaggctacctatttccagaaacttcattgcggttaaaaacagatagaaatcaagagattccggtagatacttggccattggcttactggccggatggttccgtgaaatggagcggagttgccggagtcattcctgccggaacagaaagactgacattagaaaaagccccccggaaagcaaaaactatcaataaacagcctaatacttctattgcaatcactgaaacgcctgaagatattcaaattgaaacagggctaatttccgtatttattccccgacgcggagatttcctgattgatagcctattatataagggaactaaagtaggagagaaagcgcgtctgatttgtaatacgcaaaacgagccgattcaagaaaatacatctcaaatatcttttactcattacataggagaaataaaatcagtaaccatagaacgtctgggctctgtacgggcacttgtaaagttggaagggatacatcggaacaggaataagaagattgatacgaatcactctgaaggggaagggaactatgcgaataactctgatatgaacaaacggaataaccgtgagtggcttccttttgtggtacgtctctacttttatggtggtagtgaacagatcaaaatggtacatagcttcatctatgacggagatcagaagaaagatttcattcgtagtttgggtatccgtttcgatgttcctatgcgtgaagctctgtataatcgtcatattgctttttcgtgtgcagatggaggagtgtggagcgagccggtacaaccattggtagggcgtcgcatactcactttaaataagacagataataagaaaaacagtaatgaaaagaaagatgcacaacagatgccgactgatgaaccctccctgcaacagcagcaaatggaaggcaaacgtattccgccttatgaatctttcgatgaaaagaaccgctctctgctcgataactgggcttcatggaatgactaccgtctgtctcaactcactgccgatgctttctccattcgtaaacgtgccaataacgataatccctggataggaaccttttccggcacacgtagcgatggatatatttttgtcggagatattaccggaggattaggactttgtatgcatgacttttggcagtcttatccctcttctattgaaatttcagacgcacgaaccccggtagctacccttaccgcctggttgtggagtccggagtccgagcctatggatttacggcattatgatcgtatagctcatgacctgaatgccagctatgaagatgtccaggaaggtatgagcacgccatacggcattgcccgtacaactacgttgacactgatcccacaaagtggctatgccggaaaaaaggcttttgctgattatgccaaacaattttctagccctagtctgttaatgccaaccccgaattatcttcatgcccgccaggctttcgggatatggagtctccccgaccgtactactccattccgtactcgtgtagaagaccgcttggatgcttacattgacttctatcagaaagcaatcgaacaaaacaagtggtacggtttctggaattatggtgatgtgatgcacgcttatgaccctgttcgtcatacctggcgttacgatgtcggaggatttgcctgggacaatacggaactggcttctaatatgtggctatggtataatttcctccgtaccgggcgtattgatatttggcgtatggcagaagctatgacgcgtcatacaggcgaagtggatgtctatcatatcggtcccaatgccggattaggcagtcggcataatgtaagtcattggggatgcggagctaaagaagcgcgaatcagccaggccgcctggaaccgtttctactattaccttactacagacgaacgttgcggtgatttaatgactgaagtgaaggatgccgaccacaaactctatgacttggaccctatgcgcctggcccaacctcgcagtgaatatccttgtaccgctcccgcccgtttgcgtatcggtcccgactggctggcttatgccggtaattggatgacagaatgggagcgcacaggtaacactgcttatcgtgataaaataatagcaggaatgaaaagcattgccgtcctgcctaaccgcctctttaccggccccaaagctctaggatttgatccgtcaacaggaatcatcacaaccgaatgtgaccccaaattggaaacaaccaaccatttaatgacgatcatgggcggatttgagatagccaatgaaatgatgcgtatgattgatatacccgaatggaaagacgcctggcttgatcatgctgcacgttacaagaagaaagcatgggaacttagccatagccgttttcgtgtctcccgtctgatggcttacgcagcttatcacttgcgcaatacccaaatggctgaagaagcctggaaagatttgtttacccggttggaacatacacctgcaccgcctttccgcatcactaccatacttccgccggaagtaccgtctccattagatgaatgtacgagcattagcacgaatgatgctgctctttggagcttggatgctatttatatgcaggaagttattccgaaggatgaatagcagaagcatttatttcttcacatttcaccatatcccaaccttggaactgaattaataataggtgaagtgtcgttccagtagccagtttctgcacaactttatccttactgtatcgcaacagttgctgtcttccttcttctgcttgggcttcaagttcagcattggtagctgtacgtgtagcgtatttcaactccaggatatagctgtgttctatatcggaataacgcattttgtccggcaataggaagaagtcacaatagccatagttcatttccagttccggctgtacgagataataagaagcaatggcaagataggcttttaggaaaccttgcaggtttctttccccttctatcgcatcacgtatggaagagttctcccgataggcacgggcgatggtttcgaagaatggttgccaatgaccatcgaaggcgaaatcatctatcaagtctttcagatgtgaaagattcagggtatgggcctgttgatagtagtcgcgcaagaatccaaggtactgctcgcgcacacaattgttaggtatgcacattttcagacggtcgccacgggtgccgcacatggtaagtaaaccataataatagagcaggcttcggaagttctctatatctgctatcttttctgacgggaacgaagtatgtaagtctaccagtatttcaccttttgccgcaatttcttcgatagtactcatgcggcttccctcatgggtgttgtcgtggtcaatgcgtgccagcattttcagtttactgtaatccgtacggatattcttgtctaccatattttcgggtggacggtgaaaatcaatttggttacgtaaatagtataaagtcatatcgcaattaaacacacggtcgttgtccaaagatgttctggcgaagcaataattgtcataccacggtttcatttctgtaatcatcgcttctacatcaccgaccagctttccattttgttggtaataacggagcatttcacgtacttcagtttcatcaaatcctatcatggcattaaaacgggaatcagtcgatatattccagtcaatattatacccgctagataaatcatccagtgtgatagggctgactcccattaggaaaattcggtcaaacatacctttgaactgcttgaagtattcacggtagaagccgctggcatgagtcaggtcatggaacattttctgtccgtgttcgctcaatatgacgttggtaaagttgtcatattcgtcaattatcagatagagaggatatcctttttctttagcctttacttctatatatgataattttgctttagcgctttcaatgctttctactgttgacttgaaatcttcatcataataagatgcgtatgcatgggcaaactggttgatgatgatactgcaatattcattaaagctactcatcaaatctgctcccggcagtgagcagcctgcttttgagaagtcgaagaaaaggacctggaaactgttatgttgtttggttggacggcttcctatccataagtcaccgaaatacttgtcgaagttatccttctgtattatgtcgtaataagtacgcatcatgcttaggaataagctttttccgaaacgtctcggacgaataaggaaaaggtaactgggcatttcctcgataaggggcagatacatggttttatcgacgaaatagaagttttcgttccgcatccggttgaagtcggatattccgtatggtattcctttcacttggctcatattggcaggcttttaatttgtacaggcaaagttaatctattccgtggaataaatcaatgatttgcgactgtattatggaaaggtgactgtttgttgttgtacaaagtagcactagctgtccccaaatctattaatagaaaagttcttctgcattaagggtaaacttcctttcccttacaaccaaactggcaattaacttattataaactataaacgcaagttctgtttttataaatgaagcttttgattataaaaacaaaacttgcatttttataaacggaacttgcgtttatagattagtcttaagcaactgatactttggtactaatccaaaagaagtttgcaaagggataagagtaacttttctattaatagattacgggataaatagcgtactttatcccgtatgctcttactttaaataattctttaacgggcaatcgctctttttcaacccttcagcaatgctttttgcattcatgtgcgctcctttcaaagaagagtgtgtatggtcatgattatagtaagttgctgctttcttcacacctttcttttctagtttatcggcactaatcttattcagatcgataaaataagctcccgtagcttccgcagcttcacgtgtccacttgccaaaagactcggtgttgcgttctatctttccctctttccatttgttgcgtggagtatggcttaaaacgatgggaatggcgcctttctcctgaacgtccatgatgaacttccgaagataccagccaaacgtataaataacctgatacttaccggtcttttccattaaaaatactttgctctcgtcaccggaaccacgtaattcggcacgggcctttcctacattaatatctcctgcatcattatgtccgaactgaatcagaacgaagtctcccggttgcaaagcattatataccttatcccaacgaccttcgtccaggaaagtgcgggcactgcgtcctgccatggcacggttttctacagatattttattcagattgaactcgtcggcgattacgcttccccaaccccacataccatttttgtctttatcctcatttcggaccgtactgtctccgatggtaaacaataccggacgtccatctttacggctggaacctgttacagtatctttctcaatgggctttagataattggccaattccagtccctcataagcacgtattccatccgcagcagattccgcattgactttagcaccgaaagcacttgtgtgtatacggtcgatgtagaacatatatttcaccttattcttaccgaacttctcgaatttgcgggcactgatatcattcaaatcaataaaaggaaccccctgttcttcggctacttgctttgcccacaatccgaaagtcttgttgacacgtgtgatgatggtgctgtctttatcttcccaggcattacggggagtaagcgagaataggatcggatgagcaccttttgcttttacatcctgaataaaacggcgcatatattccccgtatgtatatacggtttctttcactccggtctctttgatggttacgttcagcgtatctttgccgattcccggaatagaggcgcgggcacgtccgctgtcataaggaccattgtcattgtgtcccaattcgatgataacccagtctccggggcgtacacctttgattacatccggccaaagacggttgtagaaagtacggctgctggtacctcccaacgcatgattctcaacagtaatccggttggaatcgaaatattcaccagcaaaatagccccatccccattgtccgttgttgccattgcctaaagttccggtacgcatggtcgaattacctaccagaaacagaacagggttgtcacctttccggctggaaccggcttccggtcgcgaggtacgtgctttattcaggctatccagcgtgttgtcaaccacctgattgacatctgccatgggagcggaaactttattttgcgcttgcagttgcaaactgaacgtaatggctgtcagccaacatatatacgggaataatttgtttttcatgaatctgttttctttgaaatccctcactgaccggtgtctaaacagtcagtgagggaactagctactaactaacctctaactaaacctaatgaatgattatctttaaacctaatgaaaaaactgtgtatgttattttaatttataaacttctgttccggcaagcaggaaacaaccgactccgtagtcttcaaagtcgggcacactcttataagtaaccggctgtccgtctttaggctccttacctgttccctgcacatatcccaggaatccgttcggatgtacggcatctttcaccatagcgttccatgcttttaaaaggacgggaagatactctttacggtcgagcaatccgttgcggactccccaagccataccataaacaaataaggctgtaccggaagtctcttttcctccgaagttcgtcgggtcgtgaagactgacattccagaaaccatcttcacgctgacatttcttcaaagccttgctcatggtcaggaaatcattgatatagtcctgacggtgtttctcgtcagaaggaatttcatccaatacacgtaccaaggcagcatatacccatccgtttccacgactccaatagcaatcttcgccattcggctctttatatggaggattaaaatcctgatcgcgccaccacagaccgtctttggggttgaacatacccgttttatcgtgttggctgcgtgtgtagtagtacatatcccacatcttatcgtagtatttctgttctccggtcatctttccgaatttagcgaagataggcattgccatttgcacagcatcaatccaccaccagtcgttcacctgcggggtgttcaccaccatatcgatacttgctttgatattccgaatcatgttcgggtctgacgggcagattttatagatatcaatgtacgcctgtccgcaacaatggtcgtccgcattacgggtagtattgccgttgcgcattccccatttgtggaaatcggcccagtcgtaagtatacttataataatcctcacgcggataaatagaatagagagccatcaatccttcataatatacaccacgcgtccatatattgctgggacgtacacgaccgtaaaaactgggagtagtgtaatcggcatactttttcataaagtagtcatttacctttatgatattctctaaagtctctttttgtgtcgggagttcttgtgctgcgaccgtatggactggtatcagacaagaaagaagtaatcctgtaaagagtaagaatagtggtttcttcatggtacaatagttctgttttattaatttgctgtttatactaatttctatggcaaaggtaagagacgttcttttctttttcaatggatttccgtgcaaatgtctttaaattcgttcacgagacgacagaaaatagtgttaaaagtacgtctaatgatgatttctacatatatctgtacaatattctattttatcaatgggctgcgtcctttacttttgtgttgtaatttgattaatcgataaaactatgaagtgcataactcttttttttagtttctgcctgatagctatcttctcgatagctcagccaaactatgacttttcgaagttgaaacgcgaacgtctgggacgtggtgtaattgctatccgagagaatccgtctactgtggctgtttcctggcgttatttgtcttccgacccgatgaatgaatcttttgatatttataggaacgatgaaaagataaacaaacacccgttgaaggatgccactttctttcaggatacctatgcagggacagaatctgtactttataccgtgaaagcaagggaaggtaaaacggaaagtagctatcaattaccggcaaatgccccattgggttatctgaatattccgttgaaccgccccgaagatggtacgactccgtcagggcaaaactatttttatgctccgaatgatgccagtatcggtgacgtggacggtgatggcgaatatgagattattctgaaatgggacccgagtaatgcacatgataattcacatgacggctatacgggagaagtatatgttgattgctataagttgagcggaaaactattatggcgtattaatctgggacgtaacatacgtgccggtgcacactacacccagtttatggtgttcgatttcgatggtgacggcaaagcggaagtagtgatgaagaccgcggacggaacggtggatggaacaggaaaagtgattggggatgcgcaggctgactatcggaatgaacaaggacgtatcctgaccggaccggaatatctgacagtttttaacggattgacaggagaagcgatgcaaacaattgattatgtgcccgtaagaggagacttgatgggttggggagacagtcgtggtaatcgcagcgaccgttttctggcctgcgttgcctatctcgacggcatacacccaagcgtagtgatgtgtcgtggatattatacacgtactgttttggctgcttttgactgggatggaaaggagctgaaacaacgttgggtattcgacagtaataatcccggttgtaaagattatgccggacaaggaaaccataacctgcgggtaggtgacgtggacggtgacggatgcgatgagatcatctacggttcatgcgccatagaccataacggtaaaggactctacaccacggaaatgggacacggcgatgccattcatctgactcatttcgacccctctcgtaaagggctgcaagtatgggattgtcatgaaaataaacgtgatggttctacctatcgggatgcagctaccggagaagttctatttcagattaaagacaatacagatgtagggcgttgtatggcagctgatattgacccgactcaaccgggcgttgaaatgtggtctgttgcttccggaggaataaggaatgtgaaaggagaggtggtaaaagaccgggtaagaggtttatcctgtaatatggctgtttggtgggatggagatttgttgcgtgaattgttggatagaaatatggtcagcaaatataattgggaaaaaggagtgtgtgagcgcatagccatttttgagggaactctttccaataatggaaccaaagcgaatccttgccttcagggagatatcgtaggtgactggcgcgaagaaatactgatgcgtacagctgataatacagctttacggctttacgtctccactattcctaccgactatcgttttcatactttcctcgaagatccgatttatcgtataagtatcgctacccagaatgtggcttataatcagcctacacagcccggattctatttcggaccggagcttcagggcactgtattcagaggatgtaaaatacctaaaaaatagattatgaatattcgtatcataaccattgctttattgctggcaactttgccggttagtgcacagaaaaagaaaacggtagtgaatgattcaaatactcctttgcatttgctgcaacctgcttatcagggcacttatggtgacctgacacccgggcaggtcaagaaagatatagatcgtgtatttgcttatattgataaggagactccggcacgcgtggtagataagaacacaggtaaactgattaccgactacaccacgatgggagaggaagcgcaactggaacgtggtgctttccgtctggcaagttacgaatggggagtaacctattcagccttgatagcagctgccgaagctacgggcgatcaacgttacatggattatgtgcagaaccgtttccgctttctggcggaagtggcgcctcattttaagcgtgtgtacgaagagaaaggcacaacagaccctcaattgctgcaaatcctcactcctcatgctctggatgatgccggggctgtgtgtgcagcgatggtgaaagtccgtgtgaaagaccgctcacttcctgtagacggattaattgggaactattttgattttattcagaataaagaataccggttggcagatggtacttttgcccgcaatcgtccgcaacataatacactttggctggacgacatgtttatggggattcccgcagtagcccagatgagccgttatgacaaggctcaaaaagagatatatctggcggaggctgtcagacaattcctgcaatttgccgaccgtatgtttatccctgaaaaaggattgtatcgtcatggatgggtagaaagcagtaccgatcatcctgccttttgttgggcgcgtgccaatgggtgggctatgctgacagcatgcgaattgctcgatgtattgccggaagattacccccaacgtgcgaaagtgatggattatttccgggctcatgtacgcggagtgactgccttgcaaagtggagaagggctttggcatcaattgctcgaccggaatgattcttatctggagacgtctgctacggctatttacgtatactgtttggcgcatgctatcaataaaggctggattgatgccattgcttatggacctgtcgctcatttgggatggcatgccgtggccggtaagatcaatgcggaaggtcaggtggaaggcacttgtgtgggtacggggatggctttcgatcctgctttttattactatcgtccggtcaatgtatatgcggcacatggatacggaccagtgctttgggcaggtgcggaaatgatctctctattgaagaatcagtacccgcagatgaatgacagtgccgttcagtattatcaggtgaaacagaagacgactgcacctatttttgccatcgatacagaagaacctcaaatccgcaactacgcgcctaatatgatacagaagcgaaaagaatctgcatcgttagtaaaaagggggcacagtgcatcgaatgtcaccataaagacatataaatgccccttaccccaccatgcgacttgaggcaatacgcaaaatcacgactataagttgtcggtgttatccaaagtcattctggaacacattggcataagcattgttgcatgaatagatattcagcacatacttccttgatgtcctgacccatttggctggcacagagatgaacttaaagacaaacgtcttgatgcggcttgttgctttgagtccgaacctcttcacgtcaagcctcgccatgatgaatttatagaagttgcgtatgagtgccataagcagaagaaacaccgtgttttctcccataaaggattttggaagcctgttccagccgaatccgttattcatatcatcgaagatgcgttccttccctccacggaggttatagaattcgacaatctctttctcggaagactcgtagtcatttgtaaggatgcagcggtaggtgtattctccttcccacaggtcgagttcgccgtctatccgcttctgtctttgaatcacaagacggtatgccttccctttccatttctcgatgagaatggaggccagctcaaactcaatgccgcccaattccactttcttccaacctctgagggcaaagatgtcattgtagagcgaactgcatcggttagcacggatatagaaggtcttgcagtgtttagcaatctcttccactatctcttcagaacacgagccgcaatcagctctgaaacggttgataataagcttgttttgttcaaacctttcaaagaacctcttcagcgtgtccttctggtggaaacggacatttgtgttgccgtcgctgttctcaatgccgacaatcaagttgccaataaccgccacgccagggcgataaccaaggaacttcttgtatgtaggcttcgcatcaaacttctcagcctctatgaactggtggtcgaagtcaacgtcatacccctcgccctctttcagctgccctgtggacaataggcaattgaggagcagtgtattcagcttgtctgccgtgttgaagtcgtaggtcttgccagtgtcggatgtgtaggaaatgttatcctgggtcagttcctttatggctctaagaatcgtgtcggcactgcatgtgcgaagtgtcggatgaagcgaaaggtggtacatcagatgagtggtgacatcctcgatgcatgagccgccacaaaaataaacgctcataagcgaacggatgatttcgctgtattgataaccatacagcctgcatctcataccgagggttgagtcgattacagatgagagtctggagtcaaattgctccattattgaaaatattcctccaaaaggagtgagtttctcggatttaattgctacctttgccatgtctgtcgggtttgatacatattttgatttgcaacactaagataggtgaaaaatctgacatggcaaattcctgagcaactttttgttgctcaggtacttaaaaagttatatttgtaatagtgttgcggaattaaggaagaaaagaaagattaactttaaatagatagaaccatgaaacgagaagcttttaaaatgtatttaaaacccggatgtgaagctgaatatgagaaaagacacgctgccatctggcctgaattgaaagcattgctttccaaaaacggagtgtcggactattcgatttattgggataaggagaccaatatcctgtttgctttccagaaaacggaaggtgaggccggttcgcaggacttgggtaatacggagattgtgcagaaatggtgggactatatggcggatatcatggaagtgaatccggacaactcaccggtgtccattcctttgccggaagtattccacatggattgattttttagtaattaggtgagccgtttctttcattatctcaactatcttgactatttttgtccaacatttattattaatcttggaatctatatgatgcaaagacaccttttgatctttacctttcttgttagttttgtgttgaatgcttatagtgcaattgagcttcgttctacacaaatgagaacgagtgacggccttcccaataactctattcgatatatttatcaggatagtaaaggttttttgtggctggctaccttgaacgggttaagtcgttatgatggcaactcttttctcactttccgtccggaaatcggtgatgaggtatctttggcagacaaccgtatttacgatctgacagaagataaagatggttttttgtggatttctactacacctgaattatatagttgctatgatttgcaacgtgcccgttttgtggactataccggttgtggcgagttaaggcagaattattcaacggtttttgtcgctgctaacggagatgtctggctttcccattcgggaaatggctgccggaagatggtacatcagaaaaatggtgagatgacatctaccgtattcaggaccgaacgtggaaacctgccggataaccgggtgaaatttgtgaatgaggatgccagtggccgtatctggatcggcactcaatgcggactggtttctgtctccaacggacaatatcggatagaagaccgattaatccacttcacttcttcgctgtcctataaggacgatatgtatttccttacagcagatggagatatctattattatcaggaggctactcaaaagatgcaaaagttggcttctcttgccactgtggcaggggcgacatcgccaaccggaaatttcctgttgaaagataagtgggtgatcctgactactaccggagtatatacttataagtttgctaccggagagatggccgcagatcctcgtttgaatattaaaaagggagaattgatacgtgataatcgtggagattattggatatacaatcatacgggacggcttacatacgtgcttgccgaaaccggagagagtaaggatttccagttgattccccaggataagataagttatatcgactttgaacgttatcatatcgtccatgattcccggggaattatttggatttcgacctatggaaatgggcttttcgcttataataccgccgaagataaactggagcattttgtggcgaacattaatgaccagagtcatatcagttcggatttcctgcaatatgtgatggaagatcgtgccggtggcatctgggtagcttcggaatattcaggcttgtcccgtatttccgtattgaatgaaggaacttcccgtatctatcccgaatcccgtgatttgttcgaccggtcgaacaccatccgtatgcttaccagaatgtctaatggggatatctgtgtaggtacgcgtaaggggggattatacacctttgattcgagccttcattcaaaaatgaccaatcaatatttccattctaatatctatgctctcaccgaagacaaacagggacgaatgtggatgggaactcgtggaaatggtctcaaagtgggggacacctggtattataataatccttctgatttgacagccttatccgataataacgtttttgccatttatcgcgaccgtaaagaccgcatgtggataggaacatttggcggtgggctggaactggctgaacctactcccgacggtaaatataaattccgtcatttcttccagcaaacattcgggatgagaatggtgcgtgtgatagaagaagacgcaaatgggatggtgtgggtaggaaccagtgagggtatttgtatttttcatccggattcattgattgcagatgctgataattatcatcttttcagttatacaaacggaaagttttgcagtaatgaaatcaagtgtatctatcgggatacggaagggcggatgtggattggtacgtccggttcgggactgaatctttgtgagccgcaggataactattgctctttgaaatatgaacattacggaacttccgaaggattggttaacgatgtaatccagtctattctgggagataaaaaggggaatctctgggttgccaccgaatatggtatttccaaatttaatccgactacccattcttttgaaaactatttcttttcttcctatacattgggaaatgtgtatagtgagaatagtgcttgtatgcgcgaagatggaaaactgctttttggcacaaactacggattaatagtgatcgatcctgaaaagatacaggataacgaaactttctccccggttgttttcacggatttatatgtcaatggaacccagatgaatccgcagatggaggactctccgttaaagcaatcgttggcttattcggacgaaataaccctgaagttttttcagaactcattcttgatagatttctctacttttgattattcggatagcggtcataccaaatatatgtattggctggaaaattacgatcagggatggagtgctccttctcctctgaattttgcttcgtttaagtatcttaatccgggaacttatatacttcacgtcaagtcgagcaatggatcaggtgtttggaatgatagcgagactacactgaaaattgtaattgtccctccattctggaaaacgacttgggcaatgctgggttatgtgctgttattaatcatagccttgtactttgctttccgtatcgttcgtaactttaacggcttgcgtaaccgcatcaatgtagaaaagcagttgacagaatataaactggtgttttttaccaatatctctcatgaattccgtactccgcttaccttgattcagggagcattggagaagattcaacgtgtgactgatatcccgcgtgaattgatatatccgctgaaaacaatggataagagcacgcagcgtatgttgaggcttatcaatcagttgctggaatttagaaagatgcagaataataagctggcactctctttagaggaaacggatgtcatctctttcctttatgaaatatttttgagcttcggagatgtagcggaacaaaagaatatgaatttccgtttcctgccttcggtgccgtcctataaaatgtttattgataaaggaaatttggataaggtgacttataatctgctttcaaatgcatttaaatatactccttccaacggaacgattattctttcggtgaatgtggacgaagggaaacaaacattgcagattcaggtttcggatacgggagtggggattcctaaagaaaagcagaacgaattgttcaagcggtttatgcagagtaatttctccggtgacagtattggggtcggtctacatttgagtcatgaactggtgcaggtacataaaggcacgattgaatataaagacaatgaaggtggcggttctgtatttaccgtatgtattccgacagataagacggtgtattcggagaaagacttccttgttccgggcaacgtattgctgaaagaggcggatggtcacgcacatcatttgttacagctttcggaagagcttcctgacccggaaaagatggctgctcctttgaataaacggaaagtgctgattattgaagatgataatgacatccgtgagtttctacgggaagaaatcggtgcatactttgaagtggaagtggctgccgacggcacgtccggatttgaaaaggcccgtacgtatgatgccgacctgattatctgtgatgttctgatgccgggtatgaccggatttgaagtaaccaagaaactaaaaacagattttgatacgagtcatattcccattatccttctgaccgcgttgaactcaccggaaaagcatctggaaggaattgaggcaggtgcggatgcatacatcgccaaaccattcagcgttaaactgctgttggcacgtgtattccgtttgatcgaacagcgtgataaattgcgtgagaagttctccaacgaaccgggtattgtgcgaccggccatgtgtactactgaccgagataaagaatttgcagatcggttggctgccatccttgaacagaacctcgcccggcctgaattctctattgatgagtttgcgcagatgatgaagttgggacgaaccgtattttatcggaaactgcgtggagtaacgggatattcgcctaatgaatatttacgtgttgtgcgcatgaagaaagcagccgagttgttactgtcggaagataatctgacggttgcagaagtctcctataaggtgggtatcagcgatcctttctatttcagtaaatgcttcaaagctcaattcggagtagcaccgtccgtctatcagcgtggtgtgagtaatgataatgattctccgcaggattcataagaataagattaactaaaacagcatagtatgagactaatttctttttgtaaaatattacttttaagcggttgctttacaactgtttgtacttctatgaatgcacaagacaaagttatgaaaaaacaggattcgcctattgatatagatttgtggcaaaacggcttacccaatacgaatgggatggaagcccagggatatgatgataaaaagaataatttcaaacctagtatccgggtatatttgccgaaagcttctcaacagccggcgagagctgttattatatgtccgggaggtggatacgggcatttggcaatggctcacgaggggtatgactgggcaccgtttttcaatgaacagggaatagcagctattgtcttaaagtaccgtatgcctaatggtaatcgggaggttcccatgtcggatgcatacgaagctattcgttatgcgaaagaacatgcttctgaatggaatattaatcctgattgcattggtatcatgggattttcggcaggtggtcatttggcctctacagtggctacgcatgcttccgaagaacttcgtcctgcttttcagattcttttttatccggtaatttcgatggaacctaaatacgggcatggtggatcgtgcagacagtttctaggtgaaaaagcaacggaggaattgaaaaaggaatttagtaatgagtatcaggtggattcgcttacaccaagagcgtttatagctttatccgatgatgacaggggcgtggtacctatgaattctattcgttactattctgctttgaaagaaaaggagataccggctgccatgtatatttatcccagtggtgggcatggatggggaatgaaagatagttttaaattccgcaatgaaatgttgatagagctgaaggcttggttaatgactttttaaagtaaatgatcgaatcttatgatataattcttcttatggacaggttgctcttgacaaacccttttttatgttgtatatttgtaggtgtgaatatcaatgagtaaaaggtatcattaaaaagaatgaaaaagaaaatagtacaatatgatgacaatatattagggaactcttgcagtagttaaactgtgagagtttctgtatgagccagaggctgcgaatctttatggggtttgcagccttttttgttgcaaaaaaagaccgctatatctttaaagtcggaatttatcatttataataaacttgggtaccgtttataataaactcctcaataatttattaagaacgttgaagaggattatgaaagaagagttaatttttttcttctttgatatatgataaaatatgttttatcatgagtttactatagaaagtaaatgaaatggacgttactatcacgaaattctattcttttataaagaagatgtgcttttttatttcggacataacgtttttattctggttctatgtatatataaaagtgtatccggatatggaatattgtatatggataagtagtatttgaatcctttgcatagaactccataagaaaatcaatatctccatatccttaggcttggggtgaatgggaagatgcggtacttttgcggaaaaagtaataagcagtagaaaatgataaagtcagcatttttaatagtagcgacatgttgcagtctgcaactgtttagtcaggaaaaatttcccgatggtaaaattataccggattggttttacaaaaatgaaaaaactgatataaatggattaggaaagaatttcttgattaccgactatggagtagtgaatgatagtacactgttacagacagagcaaattcaggctgttatagatttggcgtctgataatggaggcggagtcattgttatacctgaaggtacttatcttagtggtgcgctgttctttaagccgggaacacacttgcatttggaagagaaagctatattaaaaggtagtgacgatattagcaactttcctgtaatagaaacacggatggagggacagaacctaaagtacttttcagctttgattaatgttgataaggtagatggtttcaccctttccggaaaaggaaaagttgatggaaacggtgaacgatattggaagtcattctggttgcggaggcgtgttattcctaaatgtactaatatggatgaattgcgtcctcgtctacttcatatatctcatagcaataatgtacaagtttcagatgtgcgacttgttaattctccgttttggacaactcacatttataagtgtgatagcgtaaaacttttgaatttgcatatcttttcaccttcttttcccataaaggctccaagtacggatgcaatcgatattgatgcgtgtaaaaatgtacttgtcaagggatgctatatgtcggttaatgatgacgcaattgcattaaaaggtggcaaaggaccatgggctgatcaagatcccgataatggtggcaattgtgatattatcattgaagactgtactttcggattctgtcacggagtgctgacttgcggtagcgaatcgatatataatcataatataattcttcgacgctgtaatctggatcaggctaaacgcctgttgtggttgaaaatgcgtccggatactccccaacaatataagtacatcctcgttgaagacataaaaggaaatgtccgcaattgtatctttattgctccttggacacagttttatgatttgaaagatcgcaaggatatgccagtctcgtattccagctatattacaatgcgtaatattcatctggattgtgattccttttttgctgtagagaaatcaaaacaatataaattatccaatttctgttttaacaatttgactattacggctaaaaaagatgtgaagatagatgaaaatattattgatgcattggttatgagaaaggttgagataaataaagtgaattaaaaaagaatggtagaaagactggaaaatcgtacatagcctgtaaaatcgtacaaaataggcgtgtgatgggctgtacgcacatgaatttacataagaaagtcgaattctccatattccttttctttaactctaccatgtaatgcggtatctttgacatgtgcttattcagtaaaatattgaatctaaaactataaaatacaatgaaattctgtagaattattttttgtctgtggttattggtctgtttctttccaataggtattcatgcagatatacaacttccttctatattatcagataatatggtacttcagcaaaatgcgaaagtacgtttttggggaaaagcacgtcccggagaaaagattttggtaaagacttcatgggatcataagaaatacaaggtgactgctttagcaaacggtcattgggaactgatgatacaaacaccggctgctacttccggacaatctgtaatgttgaaaggtgataataagatccggatcaataatatattaataggtgaagtttggctttgtacgggacagtcaaatatggaatttcccgtagcccgtaatccgcaagtgaaatggaaaacaggaatgttgaatgaagcggaagaaatgaaagatgctgattttccggaaatccgcctgtttcatgtagagcatcaactggcacctgatggtgaaaaagaagattgcgttggaaagtgggtggtttgtaatccggagaatctgaaggacttttctgctgtaggatttgtctttggacgtaaattgtataaagaattgagtacaccggttggattgattcagtctacttggggaggaacacatgctgaatcctggacaagtatgaaagtgatggaaaacaatccgctgtatgctgatgtcttaaaacaatattcgaaggaaaaggtgagtagggaaaaagataagtgtaaggttccggctactttgtggaatggtatgattgctcctatagtagggtatacagtgaaaggaaatatctggtatcagggagaatccaactctgttcgctatgagaaatatcaggaagtatttactaacttgataaatagttggcggaaagaatggaatcagccggatatgcctttctattttgtacagattgcaccacattacaaacaaccggcaggtattcgtgaagcacaattaaaaacatggttaagtggacttgaaaacattggtatggcagtagtgacggatgcagccgattctaccgacatacatccacgaaataaagttgcaccgggcgaacggctggcagcttgggcattagcaaagcaatatggtaaaaagattgtttattcaggacctctctacaaatcaatgaaagtgaatgggagagaaattacattagattttcaatttgcggaaggtggcctgcagacacccggcaatgaaccggtaaaaggattttttattgccggcaatgatgcgcggttttatccggctgatgctgtgattgatggaagttcgataacactttcttcaacttatgtctctgcacctgtagctgtacgctacggttatgggactttctttagagtgaatctgtttaataaagccggacttccggcagttcctttccgtacggatacttttgctcccgacacttattatcgtctgtttgccgattcggaaattcgtcgtttcccggaagcgtggcaactggatcatggaaaacgcctgtattttggttatgcgcaaggagtaggttgttgtgcgatgttacaagtttggaagaaaacaggagaccgtaggtactttgattatgtagaggcatgggctgattctttggtagacgacaaaggagagattcatttatataagaaagaaacctataatctggattatataaattccggaaaagttctgtttgatttgtacaaggaaaccaaaaaggagaaatataaattggctatcgagaatttgatagatcagctaaaaaagcaacctcgtacaacagatggaggtttctggcataagaaaatataccctaatcagatgtggttggatggattgtatatggcttctccttttatggctcgatatggagctgaatttaattgtccggaatggattgatgaggctgttaaacaattcactctatgccatcaacatacttatgacgccaagaccggactttactatcatgcatggaatgaagaccggagccagcgatgggctgatccggagactggtcattctcctaatttctggggacgtagtataggttggtggtttatggctatggtagatgctttggaatatattccccaagatcattcaggttatgctgatatgattaaatggacgaaagaattagcagaaaccctttcaaaataccaagataaaaatggcttgtggtatcaggtaattgaccaaccttcacgtaccggtaattttccggaagcttctgttacgacacaatgtatgtatgcctatatgaaagctgtaaataaaggatatattgatagtagatatcgtgccattgcagaaaaagcctttaaaggtctgtgcaataaactgctaatctcaaatccggacggaacattgacattgacaagatgttgccaagtgggtgggttaggtggtaagccttaccgtgacggcagtttcgagtattatataggagagaagatgagagataatgatgctaaagcaacaggacctttcattatgggatgtattgagttgaataaataacaagattctgggatgaaaatatttgctatatattgcaacacttttgtaagggtatttgtggatatttctattcctaagaatattattaagggcactccttaaaggatgtacactttttaaatttgattttatttattaatcaaataagtatttttaattataattttataagaatgaaaaacactgtatcttttcagaggaaaggcatatctattgccatgaaatgctttacaagcattttctatttcttcttattttcgctttcatcgctagcggcttgtgttgataaagaaccggtagatgaagaagatgtagaccctgctattaatccccctattacttttgtggaggatgatgaagaaggtaataatgaaggcattacaggtccggcatttccttcctttaccagtaataatgcaccagcatttcctggtgcagtgggatatggaagaaacgctgatggtgcccgtggaagtaacactaaatctgtttatgttgtaaccaatctgaataatagcggtacagggtcactaagagatgccgtcagccagtcaaacagaattatagtatttaacgtatcgggtgtgattgatttaaacaaagaagtgctcgtatttaaggacaaccaaacggttctgttccaaacagctccaggtgatggtattgaactttataatggtaggacttcttctaccaatgcagataacctgattgtacgctatatgcgtatgcgtgccggtcggcaggttagtggcagtgacaatatagatgcgggaggagcggcttacggtcacgaccaaatttatgaccattgttcttttacatgggggacagatgaatgtttttcacttaacaatgacaaacagccagagggactttataacattacattacaaaattcaatactagggcaaggatgtcagaatcactcttgtggaggattagttcaaacgagtgacgaagaaggaattactgtttaccgaaatctatttattgataataagactcgtaattttaaagtaaaaggactgaatcaatttgttaataatgttctctacaattggggaaatggagcagcttataatatgggtggcgaatcttctgggcactccaacacagtcattgaaaataattattttatcaaaggaccagcttatacatgggtgaatacgtcatatcctatagcaactacagataagagtatgttcgatgatgaaacgaaatatcattataatggaataagtagtgacaataacaattatttggcagatacttatcaacaagtaaatccgactaaacctttcattggtggtaccggtgatggcgatttcgatacctattgtgtaggcaactattacgatgataataaagatggcacattaaatggatttgaaatcacgcaaggcaattggcaaacttattgcagtgccactcctgtctttttgagtaaaccagacagccagcatccggaaatcaccataaaagttagtgctacagaagcctatcactgggttgttaaaaatgttggtccggttttacccaatcgtgatttggtagatcaattcatgattgatgaactaaccacattagggattaaaggaacgattttccgtaaccaaaacctagaacgccaataccctcttgccaagacttggcaaagcatcaatattggcactcctagagtagatacggacagtgacggtatgcccgatgattttgaagataaatggggcttaaataaaaatgatccgaatgatgctgtaagaactgcagcaaacggatatactaatattgaaaactatgctctttcgcttgaattcccaaatgaatatgagaaagcatggcaagaagcatacggagaatagtaacttatctaataatttatcaaacaatgaaaaacgctacatttttacaaaagatgttgtggctgctatgccttccattgatcttgctttcgtgtgaggataagatggacgagcactatgaagtgcccgattgggtggcagacaacgcatgggaggtgttaagttccggtgaacacggtaactattctatcttcctacggggactggagatttccggttacaaacaaatgctggaaggcaaaagtattctgactatcatggctcctgatgacacagcctttcaggcttatctgaacgaaaaaggatatgccaatattgaagtcgtgcccattaacgaagtcaaaaagctcattggttatcatgtactttattactcttacaccaaagagaatctagttaatttccgtcctgtgggaagtacagaaacggaagaagaaaaaaatgttgatgctggattattctacaagcaccgcaccagaagttcggacactccggaattagaaaacagatccgatggttcttccgttatggtgtatcatcttgaacgttatcttccggtattttcttaccgcttttttcagtcaagaaagctggatgccaaaagcaattacgaagctttctaccccaattccacttggacaggagacaatggattcaatgtttccaatgcatctgtcaaagagtatggcattatagccaacaacggttacattcatgccattgaccgtgtgcttgaacctttggaaactatctataccgagatgaaaaaacgggacgaatattctacatttttcaatctatacgagtcttttggagaatatgttgccgatgacaacctgaccaaatcatatgctgcagcatacggtgtggacactttataccaatatcaacacaatggtctgcctaacattgcttgcgaatggccggttagctcctcactcgctttcacctctttgacagctatgggttataccatctttgcgccgtccaatactgcaatcgacagcttctttgaggaattctgggcaaaaggaggatatacttccttgggcgaagttgataaactggctatgaattcattcctgcgtcagttcattgatgccggattagcagtatttcccggtgacatagaaaagagtatcagtagtacgaaaagtgaggataaaatcgtgtctgtggaaggttccgaaatcaatgtcaatccgaatacgctgaacgataaaattatgtgtgtcaacggagtattatatggtatgaacaaaatcagcacaccgactacttttgcttccgtacttggcaccatgttccaaaataaagaagcacgttcgttcctttatgcaatgaacggaacctctcttcaaccatctttcgtttcaaacaatgcaaaatacattatgttgattccgaaagcagcgcaatttgaaggttcagagattagaacctcttatagcacatcaacgttggaacagaacacggaagatggatgggtggaattgagcaattcttccaaacaaggtattgtgaatattcattcggcgaatatcccggaaacgcaatcggcttctttgccggacaatgggataagggtcattactacccagacaagttggaacttctggtttgtcaaagacgggaaaatcactagtaacgcccgtttcaatatgcaactgaatccagaattccaaggaacggtattctcttcgttcacgaaagttggtgaaggctctaacggtacttcttattggtttgacaatgaacagctctttagcgcggaaaatggtgacttgtctcgttccatcgctatttgtgccgacaagcgctatgtttattacaactttgcccaattgctcaaggaggcgggtattactgtcggtgagactatgatgaatatctttggcaaaggacgctttgtcgcatttattccgacgaatgaagccatacagacagcattgtcagaaggaaagattccgggcgctaccaatgcctctttcgatgaagacggcaagctgaccggagagttcgacacagcgacgttgaaggattatttgaattcctattttatcaccggtgccaaaaacaccatcgcggcctatccttatcccggttccagtttcaaaagcggaacatacaagactgaaagtagcgtagctcccaacctcatttatacggataatggaagcactctgaacctcgaattgcagggacacggcaagtgccaagtggtttcaacttattccaatttcccgtttgcttttggagacggttgttttcacttgattgatggcgtctttttaaaatgaaaaacataagttatgaaattattaaaatacatactagtagcattagtattcgttgtcactaccggagaggctttcgggcaagtcaaagtcttgtccggtaaagtatcggaaatgttcggatcgacagcggatcctttgatgggagtcaacataaacgtcatgaactcccagaaccgttctttgggtggaaccgtttccaatgtagatggtatctataatctgaagattcctgccggggagaaaaacctgacaatcgtattctcttatattggaatgaaaacgaagagaatcaagtatacgggacaagaaaagttgaacgtcaccttgcaggaggatacgagaactattgaccaagtagtcattgaaggaaaacgtatcgaacgcaatgaattgggtattaccgccagagaacagacttccgctacccagaaagtacagatgagcgacttggtagacatagctccgattacgaccatcgaagatgccttgcaagggcagttgggtggtgtggatgttgtgttgggcggtggcgacccgggtgcacgtgctaatattcagattcgtggtgcaagtacgctgaatgccaatgccgacccgttgattgtaatcgatggtgtgccctatccggctaatattagtgacgataccgacttctctacgatcagtaatgatgatttgggagcattacttaacatatctccacaggacatcgaatccattgaagttttgaaagatgctgctgctactgccatctggggtactaaaggcggtaacggtgtattgatgatcaaaaccaagcaaggagtaacaggaaagacccgtttcacgttctcttccaaattctctgccaagtttgaaccgaagagcattccgatgctggacggtaaccaatattcagccatgatttccgaagctctgtggaacagtgccaactatataggtcttagtaattcgctaaattatctgaatatgctttataactctccggagatcggttatcaaccggactggacttattttgacgaatacaaccaagataccgattggttggctgcggtacgcaagaatacacagacatgggataataacttctccatgagcgggggtggtgaaaaagccacttatcgtttttctctaggctacctcaatgaaggcggtacgacgatcggaaccggattcagccgtttgaattcttctttgagtatcaactataagttctcaagaagattgaatttcggggcacagttcaactactctcaatcaaaaagagatgaaaactattacaacgtgcgctcggaagctttccgcaaagctccaaacaaatcgccttattacgttgacgacacgaccggagaacttacttcacagtatttcaatcacagtgaatatagcaacttggatccggcattcaaggaggacggtaatggtagcaaatattacaatccggtagcgatggcaaacgagagcgtcaagaaaacgatccaacgggagagcaagatgactttccgtatcgaatatcagatattgaaagggttgacttataaagcctatgcgaacttgaatatccgtaataccaaaggccgtatgttcttgcctcaggttgctaccggccttccttggacagacagttttgccaaccgtagtacagatacctcttccgaccagctgaccattgctacggaaaaccagttgatgtatcgcaacagttggaaagacaaacattcattggttgccaacttgttgttccgtacgaatgaaacgactaactccagttatggcagtcaaacttccggtaatgcatcttccagcctgtccgaccctactatcggaagcacggtgcaaaaagtaagttccggtgattctaaggtgcgtaatatcaatggcattggcgttgttaactatacgctgctcaaccgttatgtattcaacggaaccattggagtagagagtaactcggcaatgggtaagtccgaacgtttggggattttccctgcggcaggttttgcttggcatttggctgacgaaccgttcatgaataacacagacgagtggttggatgaattcaaactccgtttcagtgtcggtgaaaaaggtaatggcgccgaaggtacttccatctatctgggttcttatgcatccggtgacaactatatgaatatgaactccatcaaacccagtagcatgcagctcaacaggttgaaatgggaaacgactaccgaatataatacaggagtggatatttctcttttcaagaacagagtaagtctaacagtggatgtgtatcagaagtatacaagagatatgttgcaaccaaaaatgagcacgcctaccagcattggttacggtagtggatataggatggcttactataactcaggaaagatgactaataaaggttgggagttccgtgcaaacataatcgctcttaaacgtaaggactttcagttgggattcaatttcaacatcaaccaaaataccaataagattacagaaattccggtaaactatacggaagaaaactacacattcggtaacgggaactatgcttttcgttatgaagtcgatcgtcctttaggctctttttacggttatcgctacaaaggtgtttaccagaatgcggaagcaactcatgcacgtgatgcagagggcaacattatgaaagacgttaaaggtaatcctattgtaatgatgaacggtcattatactgtagctccgggtgatgccatatatgaagacatcaaccatgatggtgtcatcaatcagtatgatattgtctatttgggcaactcacagccgagatttaccggaggatgcggttttaacattacttacaagcaattcaaactggttgccaacttctatggccgttacggacagaaagtcattaacatgactcgtttgaacaacgaatctatgtacggaatcaacaaccaaagtaccgctgtgctcagacgttggcgcaacgaaggtgatatgaccgaaatcccgcgcgcgctttatggggaaggttacaacactttaggttccgaccgttttgtggaagatgcttcttatcttcgtttgcaaactttatcattgagttaccgtctgcctaaaaaagtatgcagagcttggggagtcaataatattgatttctatgtgaccggccgtaacctcttcacttttactaaatatacaggacaggatccggaagtgaagacggaaagaacattggcaaaggatgaagcggtaacgccgacctccatccagctcacttgtggttttaatctaagtttttaaaaacgctacgaacatgaaaaaaatatttgttatactattactgacaggaggcttgttgacgagcggttgcagtgactggcttgatgtactgcctaaagacaagcagagcacggatatgtactggcaatctgctgaagacgtggaatccatccttgcgcaaggatacagttgtatgcgcaattgtattccatatatgattgactggggagagttgcggggcggatcggtaattgttccttccagagctaccgagaatggtagagtccagaattttcaagtacttcctaacaattcaagagtggcatggggtacattctaccaagccattggcatggcgaatgctgtattgaaatatgcgccgggtgtgatggagaaagacgaaagttaccatgaatcccagatgaattcacactgtacggaagcctattttattcgtggattgatgtatctgtatctggtacgtaattatggagaagtacctttgatcaccgaaccttacgtggatgatgagatgccgaccaatgtggccaaatcatctgaacaggaaatcttggaacaaataaagagcgatatgcgtacagctctggataccaatgcagccaaggaattttttgaagattcatgggcaactaaaggacgttccaccaaatgggctttgtatgcgttgatggcggaaacctgcttatgggcggaagattatggcgaatgcgtcacttacgctgactatctaattaatgctacctccggtaggcgtccggttttcatgtctgtccccagccaatggttccaaattttttatccgggcaatagcaatgagtccatttttgaattgcagttcgatggcgctacttattaccagacaaacaattgtccgactagtattatgccatacagtacttccagtaccaataaaacttatatgtattctgaagcgatgacattgcgtttgtatgaggagagtctgaaagaggctgtccgtacttatttcggttcatgtgcaccacgcgaaaatcttcatacacccagctattatgacgattatcccgataatgccattatttggaaatactcagggatgggtacaaatagtctgatagctatccgtggtggaaatcagatggatgccaattatatcatttaccggatggcagatgtcatgttgatgaaagccgaagcattgattcggaaaggcggtagcgagaattggacggaagccgtagagataatgaaccagattcgcaaacgttccaacttagttcccttgaccgtggctatggaagaaattagtgaactggatttgttgcaactattgctgaacgaacgggacatggagtttgccgcagaaggaaaacgatggtatgatctgcttcgtctgggaaagcagcaaaattttaagtataaggctgaatttaaggaactcgtgatgcagaacaacagcaccgcagagcctaaatggctaaattccgctttgaataacagcgatgcctggtatctgcctcttcccgaaagtgatgtgaacaccaaccgattattggaacagaacccttattatgataaataatcaaaccatgaataaaatgaaaaagataggaaggatttattggatgctgctcattatcttatgcacggcctgcaatgatccgtatgaaggagacacgttctctgtttatgatatacagccggctgctacttacttgtccagccgttccggtgaattttcagaatggatttccattatgaaatacgctgacctatacaatgccgtcaatcaagcgactcaatatttcaccctttttgtccccacgaacgaggcggtgaaagcattctatacgaagaaggggattacttctattgaagaattgggagtggaatatgctcgtaacctagtttcttttcatattgttcaagatacaatcagtcaggaaaaatttatcgagcaagaaggcacgttaagtaaaaaaacggtttccgatgacttcctttcggtgtctttcggcagtgctgaaaatggcggcggtggtttgcaatcagtctatctgaataaggaagcccatgtcatagagtttgccaatttggtatcaaacggctacgtttatgtgcttgaaaacacgttgactccgttgaccgagagtgtgtatcaacgtatcgctgaaaatggagactacaccatcctgaaaggtgcattggatgctaccggatggggaaaggaaatcaataccatctacgacaccatagaaaatcagtcgggaggtactactcagcaaaagcgaaactataccttccttgccgtaacggatgcagtttttagtgaaaacggtatcagtagtttgcaagatttagtacggaaattggaagcaggttctgactatactaatccggataatgctctttatcagtacgttgcctatcatattttgccgggaagctatgatctgaagaaaatgaggagttttgatacagcagacgtaacttctaaaatttgggatacttcaagtaccggaaatatcgtcaaggtaagcaacaagaatgatattttctatctcaactatgcagatgaggaacatcgtgccacgttcctcgaagattacagtgacttgcaggcaaagaacggatacattcatcaagtcagcacatggttgcccatcgccgaagctgaaccggaaactgttttgttcgacttgtgtaattactccctcatcggtgaatggattgcagctggtcatggagaagaaggtatcaaatttcaggcagtaggagatgaagagaaaaagtgttcggtgacagaattaaactgttatcaatatgaattagtaaatccggcaggagcgtatgacagttattataatgttacttatttccagataagttcaaaaaatgattggaaaacagcaaataatggtgatcttctaatgctgaatattggtaacactggatgggtttccatgcaaactccttccattatcaaaggtaaatataaagtgactctgcagtttggatatgctacatcgcaactattcattaagcaacaaagtaatagcaatggcggacaaatggatttcaagctgataagcggaacagaagaagttttgttgaacgagcaaactgaatataagccttatacagaattagaaggttcagctcctaaattaggactctataaaagcgtcataaataatgaaatagagtttacagatactcaatcatatactttaaaaatagtattgaaagatccgggagctagcgctagttccaactctaaatatcgtatttatctggattatatcttatttgaacctgtaatagaagaataaaagaaccatgaaaacgaaaaaatacatactatatgctctatcctttctgacattgataggcagtagttgttccgacacatgggacaaccattacgctcaagagcagagtgcagtaaacaatgaccaaattacgattgtcaataaaccgctgaccgagtatctggcagaagaatcttcgttgaccaatatgtatcagttgtttaaggaaaccggtatgattgacgaaatgcagaaaaaggaacagatgtacaccatcttagctacggaagcagatctggcaccaacaagagctgcaagcaacgatgatgtatataccgctcaaacttatatctccgatgcatctatttctccgtctaaaattacagatggccaacgtcttttgatgtggagtggcaaatttttgaatatcaagaaaacggaagaagaaaccgggaacatcatccagttcaataatgcaacagtaactaaaatagtgaaactgactaatggttatctttacatactggatcaggcgattgtatctccgcgaagtatgtatgagattattgaatcattgggagacgattattccattttccgtcagatgatcttgtcgcgcaatcaactgacattcgacaagaacgccagtgaaattattggagtggacaacacgggaaatacggtttacgactccgtatttactgtaaaagccccttattttgagaataaaggcttcgacattatgtcggaaaacgtgactgcaaccatgctgattccttccaacgaggtaatcaatgatgctttgactaccgcacgtcagaaactgacagaatggggactggaacgcgaagacagtatcattagaaactgggtattccaagctgcgtttttcaacaagaagtacactaaactggattttgaggagaacgaagacctcaaatcggtgttttccaagcagtggcgtaccaccgttcaggaagtagatcttgaccatccggtaaacatgagtaacggaactgcatactatgtgaagaagatgaaaattcctaccaatgtgttgatttatcgtctgaaagatcatttttattactatgaaaagatgacggcattagaaaaagaaacttatttcaaaacgacaaatctggcatataaggaaattggacatagcgatggtaaaagttatcatgacggatggcctgcaatgggatttcctagaatctattattacactttggtgtatgatctggcagatcctgcaaacaaaacttatacgcttgaatttacaccattcaagtataaagaaatgggaactacagagcatgaggtttcaccttataagattccggaaggaacatataagatttatttcggatttgaacaggacaaaagtggtaaagttggacaggtgaagatatttgtcaatgacgtggaggtaggaaccgcttcagaaagtgcaaataaaggtaccaatttccatttcgaccgtaatggcggtggatatgcggaaggatatgatgctaatgctgccaaagctgccggagttagcaaatatagtaactatgatcgcgatggtggagtcatgtccaatgagttggtcgttacgggagaagccaaacctatcacgatacgttttgaaggttcaggtaatagcttgacaaaggctatcttcttccactggtgtttgaaacctacagaggattgttattaatcttatgaaataaagacaaaatgaaaaagatacaaattttatttttcacttttctgctttgcctttttgcagccgatgtatgtgcgcagaaacaggacaaggtaagcggaaaaatcctatcttctctcaatactccggtgaagggagcggtagtgtccgttacaggaagtgaagatgtgaccacagatgaaaacggagtattccaaactgaatgtaaggatctgaagaaagcgtggatttctgtctgggcggtaggctactacacggttcgtcaggcattggacggacggaaggatatcaacatcatcctgattcccgaatctaaatataaatataatgagacaacggttttgccttttcgggttgaaacgaatgaagtcactacttcggcagagaacatcactaaaaaggatttcacgcctgccagcatgaatattgaccgtgcgttagccggtcagatcgccggtttacaggtcactcgcggcagtggtatgccgggggaaggaagctatatgaatctgcgcggtgtgcgttcatttgtcggtaacaacgctccgctagtgattatcaatggcattccttatattcctgacgtgcacaattcgcagatgatcaacggatatagtcgaaatatttttcaagcctataatatcaatgatattcagaacatcactgttttaaagggtgcggaagctgctatctatggttcgatgggtgccaatggcgttattctgatagaaaccgacggtgctacttcagacaatatgaacacggaaatcagttattacggacagttcggaatgagttggaatgataaacgtataccgcttttgtctggtatcgattataagtcgttcctgtctgacatgggtatgaattactatggaaatatggagaactttttcaataatttcccgttcatgaatgatgcagaaggcaaaaacggttacctttacaacaacaataccaactggcaggatgaactctaccggaatggattcgtcacagacaatttgttccgtatagaaggtggtgacaatattgccaagtacgacttgtcattgggttacgccaacgaacaggggatactgaaaagtacgaagcaagaccgttatcacacgcaattaaacggtaacttcctcgtaagcaagaactttgaagtgtatgccactatcggtctggcttatatgaacggtcatttccaagaacagggaatgtcccggcataccaacccgattttggcagcctatgcgcaatcacctttgcttgctccttaccagaaaacgtccaatggtgactttactcctctttattcatcttattattatggtatctgtcaggatttgacttttgcagtcagtaaccctgtcgccatcgtgaacgaagtggacgctaacaaccgtcaatatgatgtcaatatcaaagccggattcaactatcggattattcccggactgtctgtcgacggtgtatttggcatttattataactataacaaagagcacatcttcatgccgggtgtaagcgatccggttattgttcccgctattgacacttacggtgaacagaagaacgtcgtgcgcgaaggagtggcggaaacgcagaactacttctataacctgaatgcccgtttcaacaaagtgttcagtaacagacacgtccttaacgcaatggcgggatgccaagtgctgactacgcagaacgaacttgatggagcttttgcccgtaatacgacaaacgacttttatcaagtattaaattctgccaataaggtgggttcttatttcgacggttatctggcaaaatggaactggatgaacatctttgcccatgccgactatacgtataacaatcttttgaatgtttctgcaaatatgtctgtcgacggttcttctgccaatggaaaatataccaatcgtttccgtgtatatccgtctgccggattgacatggatggcaaagaatatgtctttcctgattgacaaggattgggttaaccgtctggatctccgtgccgaatatagtgttaccggcaacagccgtttctcttccaattatggcagaaattactatagcagtttgccgtacatggcagtatccggcattgtgcggacacaaatcccgaatacacacctgaaaccggaagtgaccacacagatgaacttgagcttggacgccgctttcttgagaaaccgcatcagtttgggagttgattattatcggggcagaagcaaggatgtaatcatgaatgtcaacacttcagccgtttacggtacttccggctattataccaactgtgcaaaaatcgacaacaaaggggtagaactctccttccaggcttctttaatccatctgcgcgatttcgaatggattgtgggaggaaatatcgcgttcaccgacaataagatcaagtctttaggcggatatgaccaaaagacattggaatatagcgatggcgccacagtggtcagtcgtgtaggtggaagcccgtacgaattctacggattacaggccgacggagtctatgccactcaagccgaagctgacaaagccaatttggtcaacagcagtatgcaggcatatcaagccggtgacgtgcgtttcattgaccagaataacgacggacgtattgacataaaagaccgtatatctttgggaagcgccgctcccgattatttcggaggcttttacactaacttccgctaccggcatttcgcactgtccgcagaatttgcatactctaaaggaaacaaagcatacaatgccgtaagacgtactttggaatcggcttcttctttttctaaccagagcgttgccgtcagtaatcgttggagcgtggaagggcaagtgactgatatgcctcgtgcaaccttcggagacgctatcggcaataacaacttctcttcacgttggatagaggatgcttcttatctgcgtataaagaatatcacattgagctacaactttgataaaccgatatggaacttcttccgctccggaacgatctacgtaaccggtgaaaacttgctgacagctaccaaatatttaggattggatcctgaatttgcttattcgtctagcgacaacgcaacacaaggattcgattatgcgaaagtaatgcaaccaaaatccgttaaactgggtataaacttgaaattctaattatgaagatgaaaaaaataatactgaatgtcgcattggtctttgcagctgctgtaatgggtagctgtgacagcttctttgaagtagatacggatgacacgttggacggcagcgaatatatttctgaagagagcgaaatgtattcggggtatatgggtatcatggcaaagatgcaggctgtcggtgacaaggcaatttacttgaatgaactaaggggggaactggtagaacccacctcaaccgctcccacagaattgtatagcttgtacaattatgatgatgatctggaaggaaactcgtatgcgaatcctgctggatattatgagataatcaatgcgtgcaacgactatcttcggaagttacagacatacaaggagagcaattcaatagatatgacccgctataaagctttggtcagcagtacgttgcgtataaaagcatggacttttatgacgattgccaagatttatggtaaagtcgtatgggtggacaaaccgatggattcattaagggatctttccaaattcaagactttggaattggatgatgtcatggcagcctgcaaaaatctgctggacattggttttgatgatgtagacggaacatacgagactgcttggaaagactgggtggatccggatacagaacttgcaaacagtgaataccgtcgttgggatatgatgacgcctccttactatgccgtatatgcggaaatctgcttgtggatgggtaaataccagaaatgtattgatctgatacaaggtgaaatgaatagaagataccaacagagtcagaaccagtctatcgcctatctgcgtaacgcccaattgctgggacaatggggaaagttctttaattacgagactccttacgattatgagtcggtatctgctgttatgtacaactatcagaataagcagacaaacagtctgttaaaacattttgattccgattaccccaataagttctggcttgctcctgctgaaaaagcgatggaacgcttctcggataaagacttcgacccgataggtgccaacgaagaagatttcaggaaaacctatactttcaaggaatacaatggcaagtgggttatcagcaaattccgtccgccctataatccggtgcgtgccgcttatcgcgatgacgtgtttgtctatttgtaccgtggtgcagaactttatctcatgatggcggaagcgttcaaccaactcggcaagaagaatgccgttgatgcattgataaataccggtgttgaaggttatgtggatgaattcgagagaaatgcggatggagttctttccggaacatggaacggctttactccccactggaccagtttgaaaactgtatataaactggcaaacggaacgacgagtattactaaccgtgcttatggagataacggcttgcgtggaactgccaaaaccaatatgggctctcggtcattcaccaatgatatcaaaagcaatgatgaggaactgttgaaggaaatgatgctggaaatggcttgtgaaggaaaggtttatccagctatgatccgtatggcgaaacgttataatgacaacagtattatggcaaaatatatttgcgagaaatatgaaggcaaggggaatgttgccgctatccgtgaaaagatcatgaatggagactatttcatcaaatggaatttaaaataaaatttcctgaataatccactgacatggattaagtaaaatatgggtgacgcgggtttttgaatgagaatccgcgtcatttgtttcaaatataaatacttttgtaaataacaataataaagaatcatgaaaacattcgcagtatctattgcagtactttttatttggacagcttgcggagatggaaatcagccgataattgaccgcgaggcattagtagaaaggaatagtcctgttgtgacggcattcgattcattagcttcactttctgtaggaaatggagagtttgcttatacggtagacataaccggattacagacgtttccggacaattataaaaaaggagttccattgggaacgcaaagccagtggggctggcatagcttcgccaatccggaccggcttactccggaagaaaccctgaaagaatacgattttggcaggggaaagaaagaactttacgctactcaattcaaagaagaaggcagacaacaggatgccgctaattggtttcgtgtcaatccgcatcgtcttcatttaggaattgtcggttttgacgtggaagaaggtacggatattgaacaggtaactgacgttcatcagaaactttgcttgtgggatggaaaaatcgaaagccggtttaaattaaacggtgaagattatcaagtggagacagtctgccatccttctaatgatatgattgctgcaaatattacttctaaggcgcataccgggatttgttttcgctttccgtatcctacgggcgctcattgtgatgatgcgtgtaattgggaagccgttgataaacatacaacgactattgttactcaaaatgaatcttccgcagttttgaaacatactttagatagcacagagtatttcgtaactttgtgttgggaagggaaggctactttaaatgagaaagcaaaacattattttgtcctgactccgatggacgatcatttagcttttacatgtgcttttactagtacagctccttcaacgcagcctgttactgtagcacaaactcaagaagaagcaaaaaactattggaactcgttttggaaggaaggcgcagctgttgacttttcggcatgtacggacccacgggccaaagaactggaacgacgtgtggtacttagccaatatttgcttgctattcagagcgcaggtactattcctccgcaagagacggggcttacctataattcgtggtttggcaaattccatcttgaaatgatctggtggcacgaagctcaatttgctctttggaatcgtagcaacttacttgaccgtacattaggttggtatgaaaaggttgaaccgatagcgcgtcaaatagcccaaagacaagggtttgatggcgttcgctggatgaaaatgaccgacccgtcaggaacagaagccccttccaaagtaggaagttttctgatttggcaacaacctcatttaatttatttggcagaattactttatcgtgctgatccgactaaagaagtgttggagaaatataatcgtttggtacaggagactgcagaatttatgtactcttttgctacatacgatgaactggaaggacgttacgtattgaaaagtgccattcctgcacaagaaacgttgcgtgctgcagaaacaattaatcctccttttgaactttcttactggcattttgccatgcagaccgctcaacaatggcgtgaacgtatgggacagcaacgcagtttggaatgggatgaaatgatcgataaactttcccctttagcatctaataatgaaggactttatctggctgctgaaacagccatagatacttataaagatattcgttatacttccgaccacatggcagtattaggtgcagtcggtattcttccgatgaataaactgatccgggaagattatatgaaaaatacattgcactggatttgggataactggaattggggtaaaacctggggatgggattatccgatgacggctatgaatgctgcccgtttgggtgaaccggaaaaggtagtcggagctttactgatggataaacgcacaaacacatacttgccgaatggtcataattatcaggacggtcgtttacgtatttatttaccgggtaatggcggcttgctgactgctattgcgatgatgtgtgccggttgggacggatgtacggagattaatccgggatttccgaaagatggaacttggaatgtccgttgggaaggattgaagccattaccataatcaaacacaaaaaaatatgagttattttcatctgaatcttattttaaaaggaaagctgacagtttgttgcctcttgatgttgccggcgataccattaaatgctcaaagagaggcaaagcagatcggtgactttaaagaatccatctccttgaatgaacatctgcgaggtacaaaaaggacgttgcaatatcgtcccgatggtgatgagtttgtttgtgtcaatggtaagaatcggtatacccgtgctttgtacggtagtcacagtccctttcgggtagaaacaagtgaccggccggtttttgctttttataataacggacgcggaggaaatataagtttcaaagtcattcttcgtgacggaacagaattggcgcttgactgcaccgggcattgtgaatcccgttattcggctggaaaacgtacctattatttgacagacccgtcttggggaaaaggagaactgcgtatttctgtattggcattagccgatatggatggagctatttggcgtttttctccttcgaatatgcctaaaggagctatacttcgttggcaacatgggggagctaccggaaaacgtttgagtcgtaatggagatatgggggtagatccggctgattgcttcgaacttcctgtcgaagcgactgaccttgtcactggtgaacttcctttgcagaaagaagtatacttggtacgtggggaggttcccgaaggttataatgtccgtaagctctatcaacaagcggaggcagcttctttggcattggcttctcatttgaagatagaaacgccggacccttatttgaacacgttgggtggtgcattggtcgcagctgccgatggaatttgggacgggcaggtttggttgcacggtgctattggctggcgtatgccgttaagtgggtggagggccggatatactggtgatgctttaggttggcatgaccgggcacggactcattttgatgcttatgcagctagtcaggtgactgatgtcccgaatacaatacctcatccggcacaggattctacaatgaatctggcgcgttcggaaaaacgttggggaactcctcaatatagtaatgggtatatttgccggaatcctgaacgtaacaaccagatgcaccactatgacatgaatctttgttacatggatgaattgttatggcacttcaactggacgggagatactgcgtatgtccgcaaaatgtggcctgtgattacccgccatctagcttgggaaaaattaaattatgatccggacaatgatggtttatatgatgcatacgcttgtatttgggcaagtgatgcgctttactacaacagtggcgcagtcacccattcgtcggcttataactaccgtgccaataaaatggcagcttttcttgcttctttgataggcgaagacccttcaccttatcagaacgaagccgagcaaatattgaaagcgatgaataagcgtctttggatgcagggcaaaggttgttgggcggaatatcaggattttatgggacatcgccggcttcacgaaagtccgggattatggactatatatcatgcactcgatagcgacgttgccgatccttttcaagcttatcaggctacacggtatgttgatacggaaataccacatatccccgtgtatgccgatggactggaagaggggtatgcaacgattgccactaccaattggttaccttattcctggagtatcaataatgtggctttcgcagaggtaatgcatacagctttggcctatttccaggcaggacgtccggaggaagcatatcgattgatgaaaagttcatttctggatggtatgtacttaggtaacagtcccggcaatttggggcaagtcagcttttatgatgctgcccgtggagagtgttatcgtgactttggagatccgataggggtagcttcccgattactggtacaaggattgtatggcattttacccgatgtattgaacgggaagatggtgattcgtccgggatttcccgcaggatggtcaaaagcttctatttctttgcctgacataacctatcactttgtcagggagaatgatatagatatttaccggatagagcaacgttttaaggcacctttggcattgacattacaagtgaatgtcggaagggaaaggattcattctgtgaaagtaaatgggaaagaagttgactggagctttgcggaagctgcttccggttatccggtggttgttattcctgcttcttctgcccaaaaagcaattgtcgaaatagtgtggggaggaaacagtctgaatccggttctacctgaaatacaggcggaggctttagcggagatccgtgttccatccattttaggggcggtattcggtgaaatatatgatccgcagggagtgctgatacaaccgaatgttagtgatacatctataagaagtaaggtcaatgatcatttggggcatcatacattctttgttcgcacgaaacaaggacagatggaatggtggcagcctgtaaacgtacagattacaaaatcggaaaaatcaccggtcattcttcctttctcgcaggtgaatacgtcagagtgccgggtgatgaatatggattctttgttcaatgcgaatgtgacagatattttccggaatgagtatctgacaccccgttcgccttataccactttacaacttcctgttcagggcattggcgagtggtgtcatccgaaattaactgctgatattgatgatgcaggtttgcgtgccttggtacgtgatgagatgctgactaccaaactgggtgtgccgttccgaacattggctcaaggaagcaatattgcttttacttcgttgtgggataattatcccgacagtttgagtattccgctttccggtcgggcttctcatgcctatttaatgatggcaggcagtaccaaccacatgcagtgtcgcattgctaatggtattgttcgtgtatactatacagatggaacttctgatgtattggaattagtgaatccggataactggtgtcctattgagcaagatttctatgttgatggtcaggcattcactgttgtttctccccgtccttatcgcattcattttaagacgggtttggttagcaatgacttgggaaaggacttaggcataaagggtgtttatggacgttccatcgagggaggagcaggtgtacttttggacatgcctctgaatccttccaaagagttaagtcatctgacgttggaaacactttcaaacgatgttgttatcggtttgatgggagttacattgcaataaaataaaaataacatattaataaaaggataagaattatgatgagaagaactattaatttactactgatgttgctttttgtggcagaggtaacatctgcgaatactgttgattttgataaagcatttaaagaaagcgcccgtatcgaaaaacagattaaacggacctcttttccgaaacgaacatttcttataactgattttggagcaaaaacggatgatgaggctaatccttgccatgaagccattaatcaggctattttacagtgcagtctgtcaggaggtggcatagtaattgttcctaaaggcactttttataccggacctattactttaaagagcaatgtgaatttccatctcgaagagggagctgttttgaaattctctacagatcaaagcctttattttcctgctgttttaactcgttgggaaggaattgattgctataatgctcaccccttgatttatgcttatggtgaaagcaatattgccataacaggaaaaggtattattgacggacaaggtagcatggaaacttggtggccgatgtgtggggccgtaaagtatggttggaaagaaggcatggtggctcaacgcaatggaggtcgtgaacgtctgttgatgtatggtgaaacatcgactcctgtctacaaacgtctgatgaaaccggaagacgggatgcgtccgcaactattgaatttacattcctgtcacaccatcttgattgaaggtgttactttgttaaattctccattttgggtgattcatcctcttttctgcgagagcttgattgttagcggagtgactgttttcaatcgtggacctaacggagacggatgtgatcctgaatcttgtaagaatgtgttgatagagaattgtacatttgacacgggtgatgattgtattgccattaaatcaggacgtaatgaagacgggcgtaaatggaatattcccagtgagaacattatcgtacgtggttgcatgatgaggaatggacatggaggagtagtgatcggcagtgagatttccggtggttaccgtaacttgtttgtagaagactgccgaatggatagcccgaatctggatcgtgttattcgtattaagacgagcacttgccgcggaggacttatagaaaatgtatttgttcgtaatgtaacggtaggacaatgtcgtgaagctgtgcttcgcatcaatctgcaatatgagaatcgggagaaatgtaagagagggtttgacccgattgtccgtaatgtgcatttgaagaatgtaacttgtgagaagagtaaattgggtgtgcttattatagggctggaggatgataaacatgtatataacatcagtgtagaggattctcattttaataatgtagccaaaggagcaaatgatattaaaggggcgaaagatgtgactttcaagaacctttatatcaatgatgaattggtgaaatagaatatagttgtaatagataaaaataactatggatgaagaagagtggaagactgcctatgatgtacaaatctatgttacatctttatccgcaataagcgattgcaattggaatagattagaactctgggtaaattttcatcaagatggttttatctataagttgagacattattaccctgtactttcagaagatgatatacatgtcattcttttgttacgtattgattttagtaatgcgcagatttcaaagttattccagattctaggaagttcttttcgaatacgccgtagtagattgaaaaagaaaatgaatgtttcttgtgaatctattactgattttattaaatcattacgtttggaatgatctttctttaaaaaccatatttaaatgcgtatacattggctgtgtatacgcatttgtatacggttgaaatttgtatttcaatttataaatgtcgtcctttgttacaacaagagcgataaacttttatttgtactaatattatggaaaaatacagctccttatcttatataatatagatggaattggaagtgaactatacaatttttacaaatatatggtattgctctgaaaaagatattcaaaattagtaatctctaaaagtcattcttatgagaaagtggaattgtggctttgttatggttggattagcctttctaatcagtatttcagtacttagctgtcagacggatgatgctgacgattactctcaacaggcagaagatgtgactgctgcagatctctttattgcttcggaagcttatcagaatttggaaaaagaaataggaaaggacatgagaagagaacaaaacgcaatctctaaattgtctaaagaagacttggaacaatatcgcttactccggaaaaatctgcttaatatcgagactcgtaccgaagcaattactcaattaaagattctgacaggatatgattatcaagctaaccgtaatcgtatttcttctttggtcagggacgtttttaaagatgctgattttactaaattagaattgatgagggcacgacaaaaaagtcgaatgtacaaagtcgtgattacgcgagcagataccaatgcagaactacgtgaaaaatgcaaaaaagattgtgcggaaacggccaaagaagaaataatggaatgtcataatcattttaacgagaatattgaggatttacctgcgagtgaatttcccaatggtgataattataaattctgggtaaaagtaagagatgcttgtctatcggctgcaggaacaaaagaaggaaattgtgaaagcagttgtgataaaagctatccagatgaggagtaaattttaattgtaagagtaatatttaatagtcgtaataatgaaaaaatatctatttatttttattttcgtatctatagcccagctattctatggacaagaaaaatacactatccagggtgaattacccgaccattcgttagataatagttatttgcgtttgactaatagttcagctcttagtcaagaaaaagaacgaattaaacatttatttattgatagtatattggtggttgacgggaaattccattatgaaggtgtactttcacaaaagccattcttggcgtatctttatagtgcagggacaaaaagaaagatgttggatttcggcctgtattttatagttgagcctggtaatattcatatccgcatcgctaattgggcagatgagggtgtggtatcaggtactcctattaatgaagattataatacctatatgatcacaaggagaagtatggaaaatcaattactctttttagagaaatatgcccaatacccggatgtcgtacggttccacttatcttttttattgaacggacgaagaatgtcaagggatcctaattttccaaaatatctacagattctcgaccgaatgcctaaagcagatcgggatattcttttggcttggctggactatactattaaaaagtatgaatatgaaaaaaaaaccaaaccattattggacagtatacgtaacaatgcccctcgtttcatcgagactattccgagtaattcatcatcaacaacgatgaaaaataagtagaattttagtcttattgtgatttgtgtgacgtgtttttgattatgaaattgacaatcagcgggagaataagtgccctatatgttactaccttaaaaatagttttatgaaaaaaagcaaagctttcttgaatatggttgtgttaacctttttaatagctatatctatgcttagttgtcaatcgaatgatgattatttgcaaatcggaataggcaattgtgagagtagtaatggtacgtgtcctataaccgtatttcattaggctttttatacatccatatttaagttataatctaatatgaaagtaaaaaggcaaattcttgttctatttttgacaatgctggtaggaattccgattctttctgcccaaagcaaaaaagaacaaaagaaacaaaaggcggaagttgtcggaaagattgttacatcaaaagtctacaagataaatgtaggtacttgcattcttccatgtaaagctcctatattattgaatgagtctgattattcaatagaaattaaaaatgattctattttttctgatcttctttatctcggtcaagctgatataccatacaggagaggagctgaactttactttcaggctcctttgaaaaaatatactatggatatagataaaaagaaaaatgctcacatcaagttttcagcaaatacaacaataggtaattgcaacttttatattaaggtatattccaatggaagtgcgagcatttatatcaccttgcagcaggggaaaagtatcaattttttaggagaattaaatatgcgaagagaagaaacggagtctctgtaacacttaaattattatcatgagaaaatatctattcatattaatgtttgtatctatagcccaactattttacggacaagagaaatacacgattcaaggtgaatttccagataattcgctagacggaaaatatataatactgacagataagtcttttcttcctgatgagtacaaacgtaaatggaaagcatctgacgatgaagtaaagatattggtaactgataaaaaattctattataaaggggtaactacacgaaaaccttttttggcgcaaatatattacgatagaccaacattcagtggtcagacaagtgcgacttcttttgtaatagaacctgggaatatccagatccatataaccaattggtatgaggaaggaaatgtatcgggtactcctattaataaagactataatacttgtgtcattgaacggagaaatctggtaaatagaatttttagaactatccgtttaaaggggcagacttcggaagctgaaggagcttattcttttggttcagcatttgaggattttgaaaaaggtgaattggctttctttgagaaatatgccaaatatccggatgttatccgagtaatgttatctcgttatttggaagttaaggacttaaataaaagattggtggatgctaaatatttacgtattcttgacttaatgcccaaaacggatcgggatattttgatagcgtggcgagagtatacaatgaagagagaggagtattgggcaaagggaagagcgttgaccgatagtcttaatcgtaatgctcctcgttttattgaaagacgggtaaataatatgcttgatataactgtaaaatgattttatagaattgaagtgtaattaatatgaaagagaaactgttttttctcattataatcgtattttctgctcaattacttttggggcaagagaaatttacgattcggggtgaattccctgataatactctagatggtaaatatgtgttattaatagataaatcgtatcttcttgaagaaagggaaggacaaaaacaagcatacgacaacagcataaaaataaaggtgattggcaaggaatttttttacgaaggaactgtcacacgaaagccttattttgcacaaatatcctatgatggttcatcgttccataaagagactgatattaatctttttgtggaacctgggaatatctatattcgtatggtcgattgggatactgacgctaatgtatcgggcacttccatcaatgaagattacaatacttacattcttgagcgagaagctcaatggagtgctgtatattggaatagagatcggagaaaagtggcggaagatagtactaaaacagagaatagtaacttattagatacatcagtaactgaacagcgttcagaaggtcggtttacttttcttgaaaaatatgcaaaatatccgaatgtcatccgagtcatgttggctcgtgatttaaggacaaaatatccgattagggagtctgaactctctcaatatctacgcattattgattcaatgccccaagcggatcgagatgtttttttgtcatggtgggattatattataaaagaacgagaatttaaaaagaagaccagaataatattagatagtttgatcggtgatccacctcgtttcatcgagactattccaagtaattcaccatcagcgacaatgaaaaatgagtaaaatctttggtcttattgttattctgatgatttgcgtttcttgcaatcaaaaaaggaaagcagaggtatctctgtcttcctatacacacgatttcggaataattagttctgatataatttgtcgtgatagcattacaatcaccaatgtaggcaatgccaggttggaaataggagagatcgaaactggatgtggatgtacacaagcatcggtggagaagtatgaattaaatcctgacgaatcgtgctcgcttcatttttctttcaatccgaaaggaaaaggagcaggggcaaaggaagaactaattattatcaatgcaaacacagactccctcttttatattctgcaagttaaggcaattattcagtgataatgtttttacgttttcttttttacttatcaccaccttatacttatcggctgattggtttatggataggtattttatgcctaaaaatataagtttcattgtcggcatcgtaatatggggaggtatttgcatagggaactggaagcgaaaaattagactgtctgttgattttctatttctgtcttttactgtttttatgggatatgttctcgtttgcagtctctttacatcgcaatatatacacagtgtgtacattgtatctggatggattctttttgtgttgatgcgtaatagaaaaaatcctacagaaacatttaatagcattttagctgtcgttggagttttgtcggccttgtatggcttgctgcaatatgtagggtgtatagaaactcaatcttattttccagttaccggttcttttgataatcccgccggatttgctgcgagcatcgttctctgttatccttttcttttgtgtcattcttctaacggaaaaagaagaacgttcaaggttatggcgtgccttctcctcattatagtcgttatcttatccggttcgagaacaggtgtatttactttatgtgtagtaacacttcttttttatgctctccgttatcggaagttaattcataaaaggcgcatctttcttatcagcggaggcgctttgtttctaataagtttattcattggtctgatttatctaaaaccagcttccgcttccggtcgtgttctgatttggaaagtatctgccggattgtgtaaggaacatataattcagggaaacggacttggttcttttaaggcggattacatgccggaacaagccaaatatttgtcttcctcccatgctgatgaaagcgatagaatattggcaggaaacacgaatcatccatttaatgagtatctgttgctgctgattgaacaaggactcataggaatcgctttattcttattgtcgttgattgctgtttttcgaagtaatgtggcatttgacactccagccatactgacgcttgtttctattgctatattttcctgtttttcttatccattcaaatatgcttttgtttggttcatgattatctactgcctcgcttcacttaatcaacgggaggttgctctacgaacaatacgtttcaacaagccatttttattgattattctttttatactctgtttctttttgattaagaatatcattttcgagcgtacatggaaacgaatttcgttggttgcagaaaagaacaatggtttgctggataatgaattatctgtatttaccaagctatatgatgagtggaatggcaatccctatttcttgtacaattatgcatcagaattgaaaaatgtggaattgtacaaacaaagcgtcaacatattcttgcattgcgaatcttatatcaatacgtatgacctgcaaatgcaattggcggataattactatcaaatggaatgttgggaagaagctgaaagacgatataagctggcacaatgtatgtttcttataatgacatttggaataaaacaccctatcatgcggcagaagctattaatattaaactacgtgataccgttattgtcgatttgaaaaagcctctgaagtggcatgcgttatataaggttccgttttggtgcaatattccttccaattcttgtgagacaaggacaaacacagctttagctatcatgcgcagtaaggggtttgcggtttcgtatgatttcgttttgcagtggcctacaaaagcacatgcacattcgtggcttagtattttgatagatcacgatcgccgaatggtatgtgaaggagggcatgaaccttttttagctaccctacgaccgggtgagtgtaagggaaaagtatatcgaagaacatattctcccaattcggccttagtccggctgaataaagaagctggtagtgtcccgtcaacgttgcgcaatgtgtttataaaagacgttacggatgaatatgcaacgaccattgatcctgtttttcctgtactttccgggaaaagagaacgcaaagaaaaatatgcatatctggcagtatttgacaatgcgaaatgggttcctatttgtttttcggaaataaaagatagtaagcagatcgtctttgataaaatagagaagggagctgtctatctgccggtatattatataaatggaagggttcgcccattcaattatcctgccttgttgaatgagaaaggtgaactggagtttttaaatcccgatagtacacgtaaaagaagtattagtttaaaacggaaatatcccttaacacgcaaagcgttcactacagcactccgtttaaaacacagcatgtttcaagcagcacacaaggaggattttagtgatgccgtcacagtacatacgttcaaagagtatagcgtatcgggtagtataaatgtgagcgatactacaaagtatcgttattggcgttatatctgtccaaagccctaccgctgtaatattgcagaattgatgttcttggataaagagaataaaaaactgacaggaacaattattggttctgaagaacgaagtaaaaatcctcattatagccgttctgctgcttttgatttagatccgttgacatttttcgcatctaaaactttaagagatggttgggtaggattggatttgggcaaaccggaatctgttggaagaataggctatatgacacgtaatgatgacaataatgttcgtattggagatacttacgagcttttttattgggatatggattgggtgtcgttgggcaaacaaatagctgacgattttagtctaacctttcaccatgtaccacaaaatgctttacttttattgagagatcttactagggggacggatgaacgaattttcttgtataaagatgttaagcagatatggtattgattcatcggcaaaatgccatccgtgaatttatcgacggcgaggcgcacgtcaagggattcctgctggcttacttagggttgacgcagggctacatccttcttcccgaatacgaatcttccaaaggttatgcggatttctacatgatgcccgatctggtgcgccagccggacatagtctacagctatatcgtggaggtgaagtatgcccggcgtgacacctccgatgccgacatcgccttgctgaaacgtgatgcggcagaacagttgcgccgctatgccgatgatgggaaggtggcccgcacgaaagggaatacccggcttggattgattacgctggtgttcaagggatgggaattggtggcactggagaagctggcgtccagagcggattgcgaaaatgcatcagaagcctaaatatggtatccgattttttttaatatttatgcttgaacatttggacgggcgtctgcggaggcttcttattataaggggaatatgacgcatgtgtaacctttaggtcttcgcttgcctgttaatctttatttgtgctaaaagtttcacaggtttcatcgtcgtgaaactttatttccatcatgatgaaacttttttttcatttctatggaactttttttttatcgttatgaaacttttattcaattcctatgaaatattttcgcaagtatctttcccgtcacaatctgtggcttaccagtcataatcttcaatgtattcgtcgaagttaatctttgtcttgatgccgtgttccaggaaaacgtctgcgatttgtttctgttccgatggatgaagtcgacgttgtttgttgcgaatacggtagtacatgcttttccccattaaagatttaaggctgttttgtatggccatagcttttttgtgcggaacgtcgtctaatatatggctgatgccaagtgcaaaggtcgtgagagtgtatgcactgaaataggaacattccttttcattccccgctacatggttgatgttgatcgcttcgtagtgaggaacactttggggcacaatcatcgcagcctgaaaacggaggcatttgttgcggcgcggacatttggtgtggttgcaaaacagatacattttaggtatatcatcgtatgtaagtggcttattcattgtttttatcatattcaacttttatatcagacgaatttgatacaaatataaggatttatcttgaaatacagaatttgcttcacttgttcttatttttttagatgacaacctttttagaataaagacattccacctgcaaactccttatttatcgaagaaacagagaaaagtgaaggagatggaagaattgaccatgttatagagaaaagcattgaattgttcaaaaccgtaccgattatgaaccaatgcaaatcattggtcagtatatggaaaaaatgacataaatatggataataatccttgtttcgaaatagactgctaagttttttgtatttattcttccttttggttagttttgcttgtataaatcttaaaaaaactatgaaaagatgtatctttgtaaccagcaatcaaaataaccctaaccactatatgaaatataaattattatgccttttcgttttgtttagtttttctatatcggatctgtatgctgatattgaacttagttccaaacaaatgagaaccagtgatgggctacctagtaattctgtacgatgcatgtttcaggacagtaaaggattcttatggttgggtactttagacggattgacccgttatgatggaaatacttttcttacttatcagttggaaagcgggaaacacgatcggatttctttagcagataacagaataaaacatgtggcagaggataagaatggttttttgtggataaagactgtgccggaattattcagctgttatgatctacagaaagcttgttttgtagattttaccggtaccggaagtgatggagagaactattcagaaatatttatgtcctctaatggagatgtgtggctttggcatagaaggaatggtgtgcgtcaaattgtttgtgaggacgatcggactatgacctctgtgaagtttagaacgaaatttggaaacctgcccgatgaccggattaaatttataaatgaagattctagtggcaggatctggattggtaccatgcagggacttgcgtctgtttataaagggaaagttgaatttattgataggaaattgaatttttcttcttctttccctcatggagaggatatgtattttctgacaaagagtggagatgtgtatcgctgtgtaaatggatcgaaaaaaatagactgtttagcgtcgctgtctgcaatagccggtaatacatctgtcagtacacattcattgataaaagataaatgggttatatttacttccagcgaaggagtatatgaatttgattttcagaactttcaaataactccttgcagggaattgaaaataaataatggaaaagttattcatgacaattatggagattgttgggcttacaataacactggacgaatttattatataaactcgaagagcggagaaataaagaattttcaactgattcctgaagagaagatgaaatatatagattatgaacgctatcatgtggtgcgtgatgaccgggggattgtgtggatttcaacttatggaaacggacttttcacctacgatattcaggaagatcggttggaacactttgtttccgaagggaagaatgcaggacctatagggtcagattttttgttatgtttgatgaaagacagaacaggaggaatatgggtaagctccgaatattccggtttgtctcatatttccatttcaaataaaggcattacacatgtctatccagaatcaccggatgtttttgaccgttcgaatacaatccggttactgactaaaatgtcgaatggagatatatgggtaggaacgcgaagaggtggattgtataattatgattctcatctgaaaactaagatagataatcattatttgccctataatatttatgcgatttcagaagatagtcaggagaatatatggataggaacccggggagacggactaaaaataggagatacgtggtataaaacggatccgtctaatccttttgccttatctcattctaatatttattccattcttcgtgataagaaagatcgtatgtgggtggggacatttggaggaggactggatctggcagaatcaacggaaaaaggacaatataagttccgtcgtttctttcaaggaaagaagtatggcttacggatagtcagagtaatggcagaagatgagaaagggatgatatggatgggcacaagtgaaggtatctgcatattccaccctgactcattgattgctaatgaagataactatcatttgttcagctacaccgatggcaatttttgcagcaatgagattcgttgcctgtttcgtgatagcaaagggcgcatgtgggtaggaacttcgggtgccgggctgaatctatgcgaactgtcagacgactgtcagtctttgaaatatacacattatggaatagcggaaggactggttaataatatggtgcaatctattttagaagatcattcgggacaattatggattgctacggaatatggaatttcaaggttcaatcccaacagccattctttcgagaattatttcttctcatcttatacattaggaaatgtgtatagcgagaacagtgcgtgtatgggtgcagacggtaaactgatttttggaacaaactacggattgacgattattgacccgaagaagattccaacagagagattgctttctcctattgttatcacaggattgtccgttaatggaattcaggtgaagcctaatatgccgggttctcctttgcaagaatctttagcctattcggataagattacattgaaatatttccagaattcttttatgcttgatttttctactcttgattattcggataatggtcaaatcaagtatatgtattggctggaaaactatgacaagggatggaatgttccgtcttctttaagttttgccacttataaatatctggagccgggcagttacattttccatgtgaaatattgtgatggtgccggtatttggaatgataccgaaacaaccttgaagattgttatcgtgcctccgttttggaaaacaaattgggctatgctcggatatttcatcctgatattaatagctttgtactttacatatcgtatcatttttaatttcaataggttgcgcaaccgcatcaatgttgaaaaacaactgacagagtataaattggtatttttcacaaatatctctcatgaattccgtactccgcttacattgatccaaggagcattggagaaaatgtaccggatggatgatattccacaagccttattgcatccgttgaaagtcatggataaaagtacacaacgtatgttgaggctgattaatcagttgctggagttcagaaaaatgcagaacaacaagttggctctttctctgcaggaaactgatgtagttgctttcctgtacgaaatatatttaagtttcagtgacgtagcagaacagaagaatatggatttccgctttttgccgtctgtgccatcctataaaatgtttattgataaaggtaatttggataaggtggtgtataacttactttcaaatgcttttaagtatacctcaaatccgcaactacgcgcctaatatgatacagaagcgaaaagaatctgcatcgttagtaaaaagggggcacagtgcatcgaatgtcaccataaagacatataaatgccccttaccccaccatgcgacttgaggcaatacgcaaaatcacgactataagttgtcggtgttatccaaagtcattctggaacacattggcataagcattgttgcatgaatagatattcagcacatacttccttgatgtcctgacccatttggctggcacagagatgaacttaaagacaaacgtcttgatgcggcttgttgctttgagtccgaacctcttcacgtcaagcctcgccatgatgaatttatagaagttgcgtatgagtgccataagcagaagaaacaccgtgttttctcccataaaggattttggaagcctgttccagccgaatccgttattcatatcatcgaagatgcgttccttccctccacggaggttatagaattcgacaatctctttctcggaagactcgtagtcatttgtaaggatgcagcggtaggtgtattctccttcccacaggtcgagttcgccgtctatccgcttctgtctttgaatcacaagacggtatgccttccctttccatttctcgatgagaatggaggccagctcaaactcaatgccgcccaattccactttcttccaacctctgagggcaaagatgtcattgtagagcgaactgcatcggttagcacggatatagaaggtcttgcagtgtttagcaatctcttccactatctcttcagaacacgagccgcaatcagctctgaaacggttgataataagcttgttttgttcaaacctttcaaagaacctcttcagcgtgtccttctggtggaaacggacatttgtgttgccgtcgctgttctcaatgccgacaatcaagttgccaataaccgccacgccagggcgataaccaaggaacttcttgtatgtaggcttcgcatcaaacttctcagcctctatgaactggtggtcgaagtcaacgtcatacccctcgccctctttcagctgccctgtggacaataggcaattgaggagcagtgtattcagcttgtctgccgtgttgaagtcgtaggtcttgccagtgtcggatgtgtaggaaatgttatcctgggtcagttcctttatggctctaagaatcgtgtcggcactgcatgtgcgaagtgtcggatgaagcgaaaggtggtacatcagatgagtggtgacatcctcgatgcatgagccgccacaaaaataaacgctcataagcgaacggatgatttcgctgtattgataaccatacagcctgcatctcataccgagggttgagtcgattacagatgagagtctggagtcaaattgctccattattgaaaatattcctccaaaaggagtgagtttctcggatttaattgctacctttgccatgtctgtcgggtttgatacatattttgattagcaacactaagataggtgaaaaatctgacatggcaaattcctgagcaactttttgttgctcaggtacttaaaaagttatatttgtaatagtgttgcggaattaagggtatactccttcgggtgggacaattctgttttctgtgaatgtggatgaggtgaagaagtgtttatacattcaggtagcggataccggagtaggtattcctaaagaaaagcagggagaattgtttaaacgtttcatgcaaagtagtttctccggagatagcattggagtagggttgcatttgagccatgaattggtgcaggtgcataagggaacgattgaatataaagataatgaagggggaggttccgtatttacggtatgtattccgactgataaaactgtttattcggaaaaagacttcctggttcccggcaatctcctgctggaagaagcgaatatgcagactcaccatttacaggaactttcagaagaatgtcaggaacatgaaaagacagtcaccacatcaagaaaacataaaatattagtcatcgaagacgataatgatattcgtggattcctgcaggaggagcttagtgcttattttgaagtagaagtggctgcggatggaatatccggatttgaaaaggcatgcaactatgacgcagacttgattatctgcgatgtattgatgcccgggatgaccggtttcgaagtgacaaagaaactgaaaactgaatttgcgacaagtcatattcctattattctgctgactgccttgacttcaccggataagcacctggaaggacttgaagcgggagcggatgtttatgttgcaaagccatttagttttaagcttttgcttgcgcaggtgttccggctgatagagcaatgcgaaaagttacggaagaagttttccagtgaaccgggggtagtacgtcctgctttatgtaacacggaccgggacaaggaatttgcagaccagttggtagctgtagtcgaaaagatttattctcaatacaatatttctattgatgaatttgcgcaaatgatggggatgggacgaactgtgttttataagaaattacgcggagtgacaggatactcaccgaatgagtatttgcgtgtcgtacgaatgaagaaggctgccgaactgtttttgaccgaaagggatctgactgttgcggaagtttcttataaagtgggtattaacgatcctctttatttcagtaaatgttttaaagcgcagtttggagtatctccttcggcttaccagaaaggggagagaagtaaaacgtagtatatacttaccttgaatccggtttgtgcaggatagaccggattcaagataagtatgtttatcagttacatattgaggtttaatttatagatttcacttccggcaagaaggaaacatcctgttccgaaatcctcaaaatcaggaactttgtcgtatgtgacaggttgactgtctttcggttctttgccggttccctgtacataaccaagaaaaccattcgggtgaactgcatccttcaccatagcattccatgcttttatgattacaggcagataggtctttttatccaatagaccgttgcgtacgccccaagccataccatatacgaaaagagctgtgccggaagtctctttgcctccgaagtttgacggatcgtggaggctgacattccaaaagccatcttcacgctggcattgtttcagtgctttgctcatagccataaaatcattgatgtaatcttggcgatgtttttcatcagatggaatttcgttcattacccgcaccaaagctgcgtatacccatccgttaccacggctccaataacagttttcgccattaggctctttgtatggaggatcgaaattatggtctctccaccacaaaccttctttgacattgaacattccgttctctccgtgtttattacgggtatattcgtacatatcccacattttgtcgaagtacttctgttcgcctgtaagtttccccattttggcaaatataggcatccccatctggatagcatctatccaccaccagtcgtttatttgtggagtattgaccagcatatccatattggctttcgttttccgtattttttcaggatcggggcaaatgttgtataaatcgagatagatttggctggcgcagtaattatctgcattacgggtggttgtcccacggtggaagccccattggtggtaatccgcccattctttggcatagagataatattcgtctgcgggatagatggagtagagtgccattaagccttcgtaatatacgcttcgtgtccagatattactggggcgaactacttttttcacaaaggaaggagtgcgatagtcggcatatttcttcatgaaatagtcgttcacatgaagagttactttcagaatttcttttttatcgggaactgtctgtgcttttatgttcccgtaactcaatattactcctgcaaaaaatagtataagatgctttttcattttataataaattagattactattgttcttagatttaggcacacaaaggtgagcctttctttacctgttgcaaagaaaatgcattgtaaggaaagtgatattgaaatttgtacggaaaatatgtaatattagactttattctttattcatattagtcatggataagaaccaagtatgaataattagcaagagcgatttttttgtaagtcatattgttgtattgatatttattgtatatttgtagaagagtaaggggagacgaatatgaaaagtcatacaaataaaatattagagtctattaagcaggcattgacagagcatttaccaaaaggtggcaaggctttgttgtttggttctcaagctcgtggggatgcacggattgattctgattgggatattttgattatcttagataaagaaaaattggagcctgaagattatgataaggtaagctttcccttaactatgttgggatgggacttgggagtgcgaattaatccgattatgtatacgatgaaagaatgggctgcaagttgtattacaccattttataaaaatgtagagcaggaaggaattgaattagtatgaaattgacagatgaagaacgtaattctttggtgatattacagttggagaaagctaaagtatttttgaaacaagcagatgagatgtttgatctgaagtattgggatattgcttccaatagatattattatgcctgttttcatgctgttcaggctttattaatacaaaatggattatcatgtaaaacccatgatgggttgatagcttgctttggcttgaattttataaaaacaggcaaaattagtgcacgtttgggaagttttttggcgcgtatggaacaattacggcaaaaaggggattataattgcatttattcaatatcggaggatgaaatcagtacgataaaagctccggcaagagaacttattgagactattgaagttttacttgccgaatcataattattcttgtaaggatatcatcgttaaaagaccattttttttattttttcggccacatctgtcatatatgccggattaaattcttccagttccgtacgtggtcgaaatccccatgtcactccgcaagctgttacaccggcattggctgctgtttgcatgtctacaccggaatcacctacataaagaacatcttcttttcgtacatcggcaagttttaatatatcaaaaacgattgttggatcaggtttgacatttactccttcccgttggccgaaaacggcagtgaaatgaatttccggaaagtagtgggcaaccagtttctcggtagcggcctgatatttgttggaggctacggcaatctgaatgcctgcggattgcagataagacaataacgctgaaatacccgggtaaggacgactatcgtctgcattgtgaatatcataataaggaataaactcttttcttacccggagcacattctcttctgtcttttctccttcgggtaatgcacgttcaaagagtttgttgataccatttcctaccatgaagttatacttttctacatcgtgtgtggggtatcctaatttattcaaagcataattagtgctatgggcgaggtctgcgatagtatttaataatgtaccgtccaaatcgaatattattagttttttcattaaggcttatgtttatagttaattctatatttaaatcttttattctgcaaaggtatactaaaaaaatgagattgggaagaatgaggcaatagtttagagaatatcgaatgaacaacaaagccggaaatatatttgttattctaccagattggcttaactttgcgaaaaactaaagaataatgaatgcagaatggtttgaggcattgcctgaacaatgtcccccaacggatgcgaagcggtgcgaaggctgttattatagaattgcaaatggtaatcctgttacaacagaagatttcttttcgcaaagaaaaatgcagccggataaggtctttaaaggattaggaatagatgaatgtgtgacaagggcagtctctctattttcagagagggaagaagcggagaaaagattaaagcttcctaagttcaagaaggcaaatattgctttagtcatattggaaccaaaagatggagtgttaaagaaaacatttgatatagcacattattcttggtggagaacaaaggattttaatgttttacaagctaaaatagtctgattatgggaatggaagatgtgttaaggatagacaaaattctggatttctgtgatgtgcctcagctttttgtggcaagagatgcctttgatacactgtatctttgtcttttgtatgatgatgagacggtttatcgctatacgggaatacgtatctctacacgtagacttgaatccttcttagcaggtaaagccgatttgcgtttactctatctacagcctgaaaatgagcatgagtattacgatgttgtgtttcaatcgggtgaataccagaaaacgttattaaaggaaagtgtattgttggaagataaattgccggctgagggatatgttttatctggagagaagcgcgagaatgtggtcattaatttgccaataaaagaccgtagtctgcttgcagagcttgttcgtaaatttggctgggattgtatgtaagtttaaagaagataaaaaagattgtcccgctactgcttgaaagttgcgggacaatcttttttcatctttatatatactttgattacttcttcgtaatacggaaccagtcaacgtctgcccaaccgccgtcattcgttttaatagccggacgcgtacagaacataccgactttggcaccaatccattgtccttctcttgcctggaaaggaacacctaatgattcatatttctttccgtcgaggctatagctgaaattacacatcacaatgaggtcatgtccgccttcactacccttgattttctttccgtcacaactgaaacgcactttcagataaaccgtgttttgcgaaagatcaacagcggctttcacttcttctggtttgcctttatctgctctgtcacattcaacttgcgacagaaccaaacctttgtctgtattttctagaacaagtccggcataatccctgcccataacgacaagtccagtgcgttcgcctttattcttttggttagggctgaacgtcagtttcattgttgcggtaaaattatcagaaggagttttttgtaataagaggttggctacatcccacaggttcttataatcttctactaccggataagagtataatctgacatagcttttgtcacctgcataatacgcccatttttcattaatgttagcatgccattgccactgcggagaaagtgtatacccatcaaattcgtcactttcttgtggagtgcagataggatatgttttaccgacatttggcttcttgtaagtcaaaacaggttctccgcagccgtcaccgtctttatcaataccgataacaggccagtcgttcacccatttcatcggttggagatgcataatgcgtccgtaagcaccgacatcttgaaagtggaggaaccagtcttctccggtaggagtatctacccatgcaccttggtgaggaccgttgacaggagagttaccttgcgcaagtactgttttccattcgtaaggaccgtagatgtttttagaacgtaatacgacctgccagcctgtcggtacaccgccggccggatggaagatataataatagtcgtttctcttgtacattttaggaccttcgcaagtctgatgtgcttcgtgaccgtcgaaaattatacgggaaggagtgatcgcttttgttgcttctgcattcagttcgcagatagtgattacacttttcagtccggcacgacttcctgcgtatgcgtgtaccatatatacttttccgtcttcatcccagaacgggcaagtgtcaatgataccttttcccgctttcaccaagaccggttcgctccacggacctttcggatctttggctttcaccataaaagctccctgatcgggatctccccaaaagatgtaaaactcaccgttgtgatgacgaatagccggagcccatacacgattgccgtgttccggccgttccggagtttcgataggggagagggcattgggaactgcggcaccgatgattgtccagttgactaaatctttagaatgaaggatttgcaatcccggcaaacagttgaaactggatgaagtcatatagaaatcatctcctacacggcaagcatccggatcggaatagtcggcataaagcaccggatttttgtatttaccgtttccgaggtcggaaacccatacttcagatacatagttcttctgtgccactgcggtgaaaaccgttaataagcaaaaggctaaagtctgtgtcaatcgtttcatgttatagatagattatttatataaatgattcgttggttttatctgatggcaaaggtaaataaaaagactctgcacaaggaggaatatttgtgcagagtcatagaaaaattggtagatacctcgtaatttttgtttagttgtatttgtttctaccctatttattggtgcggttatcttttattctcactgtcaccggatgagccagctcttctttccattcgcggagatgagcaaaccatgcttccggcgttttatatccgaatgtctctttcatcgaggtgaaagtcgtgtgatactggaaatatttatttcccggggcggtaattgtataaaggaagttggctttatccttttcttccgattttacataacgttgaggaatacaagtgcccagccctacagtttctttagcatatttcacggtgtcgtttaccggccagtctgttccccagcttcctacgagtcctttatgatcggagaaagatttggaagtacctacgatgtcttgcacacctgtgcagaaaatttctttatcgagcggttcgtcaaagaatgcttcgatatgaagatcgcgatgtccggcataaagcgtgtagcgtgtcatcatattcagttcctgatcctgatatttccatccggttacttctatttctgcaattacacgtaccggtccataagagacgatacgttctgtacgagtgtccactggagtaatatgggttgccttttgtccgtcccaacctttcaatgcacccggtccgcaactgtcgaacacgcgaagtacgtcatctccgaatcctttagctaactgctcatccgtcggatagaactgcgattctttgatttccagtcctttgttgaacttgccgtaaatatccggtgtctgtttttcattgaaataaagacggtatcctaccagttccgattccaaaaccggaccgtgaggacgtaccatgctgtatatattgctagtgccgggaacggtgatagcctgtacccgttgatgtttacctttcttgttgtctacaataaacatatcggcataaactcgttcaggataagtctttgtactcttttccgaagaaagtgtaacctgaaatgtttttctaccatgggcaggaagatcggcaacaaagaccagttcgtccatcttgcggtcccggttcaaatcgtccaactgcgaaggaatttccttcataccttccatgacaacagctgattttactttgaaaccagcgtgcaactcatgtagattgataacaaccggagcatccgctttgggctgattccagttgttttgtacttcaactgtgatggttttctcctgtttctgcgtttgggcagacagactgaaagctcctaaaaagaaagtaataataaaaagatttttcttcatgtttctaaggctgaaattatacgtcgtatttctccttgcaaaaatagcagaaaaaatagcagactgtgtctcttttgaggagattatagtctgctatttgagctttttactctatataatgatattgtggttttctttttgcaccacagagtacacagagggcacagagaaataaatatgcagtaaatggatttcattttattaaactgaatcctttgtgtcctccgtgtcctctgtggtgaactttatttgagacttaaaatttcttctttcgctcccagttcttcataaaccttcccgtctacagtcagattcttggcatttttgacatttagtatattgttgccttttgatgattctacatatacattctccaaagtaactccgtcgacttggctgataacaacgccgtccgtagcttctgtcatcacgacattcttaacagtaatattgctgatcggcatttccggtaaaccattgaagaacatggcacgtcccgaacctctgcaaacaatattagagatatgaatattgcggaaagcgggtgtttcttccgttaccggaggaatacttgtcttcatgcggttcagcaagtcttcttccgattcttcgccggcgccttttccaccatagaacaagtcgaacaacaaaggttcgttcggaatgttaatcatgttgatattattaatgtagatgttttctaccacaccgccacgtccgcgggtactcttgaagcgcaaacctacatctgtgcccataaatgtgcagtcttctacatagatattcttcacgccacccgacatttcacttcctactacaaatccaccgtgtccatgcagtactgtattatttttcacgataacgttctggcaaggttcaccacgtcggcgaccatcttcatctttaccggatttgatacagattgcatcgtctcccgcatcaaacacactattgataattagagcgtttttacaagattccaagtcgatagcatcaccgttttgagaataccaggggttgatgaccatgatattatttactgtgaaatcttcgcaagacaaggggtgcagacaccagcttggtgagtttttgaaagtaacgccttccaacagtacctttttacttttgacgatactcaatagtaccggacgcaaccatggacggatttctgcccattcttcatctgtgttgataccttcgggtacattgaagtctttgcaagccattgcaccttttaatgagccggcagtgggataccatacttcttgtttttcgtcgagaacacctcctgattttaccagttttttccattgagaagcagtcagctttcctttttttactggacgccagcagtcgccgtttccgtcaaatgtaccatgtccggtgatagcgatattctctgcattgcgtgcggaaatcggcgattggcaacgacgagtctccaatccttcaaaggacgtggcaatgataggatatgcttcaaaatcaccggtgaagagtaccaatgcattctgtttagtatataaatttacgttgctcaacagttcgataggtcctgtcaaccaaatgccttccgggataatcactttaccccctccatgctgatttacatctttaatagcatcgttgattgcttttgtattcaggaacagaccgtctcctttggctccgaatttctcaatgtttacttcgtaagcaggaaaaaccggttgctgtactttcggcatttcaaaaggtaaattctggtaaagagcgtcactgattgagctttcttttacagcagtctcgctttgtttacatcccaatgagataaacggtaaacagcatacggccatccagaagagtctttttgtcaatgtgttcatttagtaacttaatttctatagggttatacatctattgtttttcttggtagttggttgatgattaataaggatgatttcataattcttatgtccttccgcaggcgatctgtcgcaggcagcctgcaggagaggaataagacgaattcatgttaacctaattctaaccttaaataaatattatgaaaaaacctcttaattatcgattgcaaagataggtgggaaagcctaaggcgatgtggactaattgatagattacgtgtattttttgtcatttctgtctattatttgcacacttctcgtgtttttatgcagaaagttcctatctttgcacaaaatttaactattaaaagatatgagttacaacttgttgaaaggaaaaagaggtattatcttcggtgctttgaacgatcagtctattgcctggaaagtggcagagcgtgccgtagaagaaggtgcaaccattacattatcaaatactccgatggctatccgtatgggagaagtcgatgctttggccgaaaaattaaattgccaagttgttccggcagacgccactagcgtagaagatttggagaatgtattcaagacctccatggatatactgggtggacaaattgattttgtactccactctatcggtatgtctcccaacgtgcgcaagaaacgtacttacgatgaccttgactatggaatgttggataagacattggatatttcagctgtttcattccacaaaatgattcagtcggccaagaaactgaatgctattgctgattatggttctatcgttgctttgagctacgtagccgcacagcgtactttctatggctataatgatatggccgatgcaaaggctttgttggagtctattgctcgcagcttcggttacatttacggacgcgaacatagcgtacgtgtgaacacgatttcacagtcgcctacatttactactgccggttcgggcgtgaagggtatggacaaactgttcgacttctccaaccgtatgtctccgctcggaaatgcaacggctgacgaatgtgccgattattgcatcgtgatgttctccgatcttacccgtaaggtgactatgcagaacttattccatgacggtggattctccagcgtaggtatgagtcttcgtgccatggctacttacgagaaagggctcgatgagtacatggacgaaaatggtaacatcatttacggataaaagattatgaaactacggatctctcttcttattatattaatgagtatgcttttcacctcctgcgggataagcacaggaaagggtacggagcagaaggaagaagagatttctgttctgagatatgataagctgttgagcgaatatgttcgctccaacagcttttctgctatgcagaagttgacgatggactaccgtatgccgacgaaaatcctgattgaggatgtattgtctatcggcacggtgaaagatgataccatctcgcaacgtctgcaaaaattctattcggatacgactttggttcgtttgcttagcgatgtagaggcaaagtatcctaatctggatgaggtggaaaaaggacttagtaaaggatttcggaaactgaaaaaggaagtgcctgatacgaaagtgccgtttatctattcgcaagtatccgctttcaacgaatctattattttagtggattctttattgggaatcagtcttgataaatatatgggggaagattatcctctttataagcgtttctattacgattatcagtgtcgctcgatgcgtccggaacggattgtgccggattgttttgctttttatcttttgagccgttacggtatgaactatcatgaaggtacttgtctgattgacttgatgatgcatacggggaagatcaattacgtagtgcaaaacttattgggatatagtgatatcggtgaagcaatggggtactctaaggaggaaagcgactggtgcaaggataatgaaaaggagatatggaattatatctgtaccaacgatcatctgcatgctcgtgacccgatggtgatccgctattatatgaagcctgctcctgctgttgatatgttgggtgctcaagctccggcattgataggtacatggatgggagcaagaatcattgcttcttacatgaaaaagcataaggatatgaagctgaaagatctcctggaatttactgattaccacgaaatgttaagtgaatccaactacttggcttcctaattgttacatttctcaatttttaattagcttcgctcaaaaccttatttgatttttaatattaaagtatagtcttaattctcaatttaaaagtggaaactgccctttatttgttgcccgtgactttaggcgatacacctattgaaaaggtattgccttcttataataaggaaattatttccggtattcggtattttatagtcgaagatgttcgttctgcccgtcgtttcctgaaaaaggtggaccgggagattgatattgatgcgttgacattttatccgttgaacaaacatacttcacctgaagatatttccggttatctgcaacctctggtaggcggagcttcaatgggagttatctccgaagccggttgtccggcggtagctgatccgggagcggatgtggttgccattgcacaacgtaaaaaactgaaggtagttcctttggttggaccctcttcaattattctttctgtgatggcttcgggctttaacgggcagagctttgcgtttcatggttatctgccgattgaaccgggggaacgtgccaagaaactgaaaactttggagcagcgtgtgtatgctgaaaaccagacacaacttttcattgagacgccttaccggaatcataagatgatagaagatattttgttaaactgccgtcctcaaacaaagctttgtattgctgccgatattacatgtgaaggagagtatatacagacgcgtactgtgaaggactggaagggacatgtgcctgaattgtctaagattccctgtatttttctcttatataaataacgcctttcaggtgttcatattcatcttcgaaacagctactgaagaagccttttcccaagttttcctctatctgtttgaagctccatagcttactgttcttaaagcgaggggtacaaaggatggaatcatccttgatatcaacgatgaataagtagataagacgattggttacttcattctcaaagtgataaacgatattgaactctggcttgatatctttctcgtgcgggaaagcattgttaatcaaacgggtggcacctgcttctaaagattctccatagcggagataacattccatgggaatgtccacttttcctttgtccaaaatggctgttgacggtctgtcgcaaaggaacagcattccatgagtggatatggcaattcttatcaccggattgatgtatgcgttcttataattaacagcttctattgcaggggttttcccgatcacatctccttttgtattcacaataggaacatattccgtgtgagacattaagtgattgaagaaacggatagcgatctggttgaacaggatgctcataagaaagatgctaggaggtaacactttatagagtacaaacatgctcgtcttgctcaacggatcttgaacaacaatggtaatgctgattataatgaaatgcagtattccgaaaatcaaggcaatgcgggcagatacaacggcggcttctgctccctgggcatataaacgtttgttgcaagaacctatctgttttaagaagtggttgataaaccttttcttatgcatataaagacttagcatcggaatgagaatactgacttccagagtaagcggaagtgcaccgggaggaacataatcaccaggaatgagagctgctacggataatagcgccagcactccggtcgctatatagaggataaaattaggaattaacaatcctttacgtcgataagaaaggtatattcctataatacctatacctgtaccgatgtaaatagccgtgtcttgcgttataagttcacacaataaaatggaaataataacggggataaaacccagcgacatgttaaatgcggaagaaagtattcctttatggtccatctctatatttatgtttatttgtcggttttatctataaaacaaatagtgtatgtgttttgtttgctaacgaatatgtttctctgcatggtaggaggaacgaacaaggggagcactctctacgatgttgaatcctttctctaaaccaactgttttatatttcgcgaattgcagcggagtgatgtatgctgcaacgggataatgccgatgactcggttgcaggtattgacctatggtaagaatctggcaaccggttgctaacagatcgtccatcaatgtttcgacttcctccggagtttcacccagtccgaccattatgccgcttttagatttgactccctttttggaaatgtgtctgataacctgtaagcttgtatcataatttgctgcactgcggactagtggactaatgcggcgcacagtttccatattgtgtgatatgatgtcggggcgggcgtcaattactaaatctaccaactccattttgccttgaaaatccggaattagcacttcaatggttgtctgtggattcaaccgttttatttcccggatggtatgtgcccaatgttctgctcccaaatcaggtaaatcatcccggtctacagaggtgatgacggcatgatccagtttcatcagtgcgatggattctgctacatgggtaggttcgtttgcatctaacggatgcggacgccctgtctgtgtgttgcaaaatttacagctacgcgtgcagatgtcaccgccaatcatgaaggtagctgttccttttccccaacattcccccatattagggcaacgcccactgctgcatatcgtgtgcaagcagtgggagtcgacaattcgctttgtttcggtgtatcgttcgttggcaccgatattaattttcagccattcgggcttacgtactctatccgtcattataagttgttcaagaagaagttggtcaatcgtgtgtacaagtgttggcgggtgttgccaccatatattccatgattacggttcgtgtacacttgcatatcaaattgttttccaagctgaactaactgttcggcatattctgcacagttctggaagtgaacattgtcatctgccataccatgtactagcaacaagttgccatgaagtttgtcggcacgggtgaaggctgatgattccttatatccttccgcattttctttgggagtgcgcatgaaacgttcggtgtaaatcgtatcatagaaacgccagtcggtcggtgcggctactgctactccggctttgaatacgggagttccttcgctcatgctcataagagtcatgtatccgccataactccaaccccagataccgatgcggtctttgtccacatacgcttgtttacctaggtaaagcgctgtttccacctggtctttggcttctttgactccgattttcaaataggtacatttctcaaaagcttctccacggcctccagtgccacgaccatctacacataccacgatataaccgaggcttgccatgtatgtctcccaactgattccccaagtatctaatacctgttgggaacccgggccactatattgatacatcagtaccgggtattttttggatgcggagaaattaaccggtttcatcatccagccgttcaacttcacgccatctgtagtctggaaagtaaagaactctttttgtggtactgcatatccggacaatgtttgcttcaacgcatcattcgtaataagcgttttgagcgtttttcctgaattatcgttcaaagtaaccaacataggagtatccaagctggagaacttattcatataatacttcatcgatttgctgaagagcggcgtattggttcctgcctgttgagacaatttaatctttttgccttttttgtctattttatagacagccttgcgcagaggactctcttcgttgctggtataatagaaagagccgtcttcctcatcatatcccagaaaatctttcacttcgaacttaccgttagtaacctttttaatcaagttacctcccatgctataccaatagagatgactgtaaccgtcacgttcgctaagcatgctgaaatattccggatagaactggatattatcgaaaatattctcctttatgtaataaggagattcatcacggagcattagtttgcaaagtgttgaacgaggatcggcaaagtagagatcgaaacggtcttgatgacggtttaatgtcatgatagccaatttgttggcatcctttgtgaagcggatacgtggaatgtatccatctgcatccagcgggagtttcatcgtacgggtgacatgtgacttgatgtcatacgtgcgtacttctactttcgagttcgggtatccggctttcggatacttgtaggtatattcacccggataatcctttaaggcatcaatacggggtgcctgtccggcaaataccggaaaagagtaggagggaacttctgattcatcgaagcggatgaaagcgatcagtgtattatcagcgctgaattccaaagcacggtcgaaaccgaactcttcttcatatacccagtcggggatgccgttaattacagagttctgtttgccatcctccgtaatttggctttcactgttgccataaagcaacttaacaagaaatatgttattgttgcggacaaaagcaatcattgtaccgtctggagaaaagacggggacctgttgaggtccaccgtcagacagccgttcaataatgttgtttgtcgtaacgcccttatcatttcgtttcaaagggtaaatgtaatgtacagctgtgtatgaatgcctatatataggtgtcgttttagtagcaatcagcaatttctgaccgtcgggcgagaactggtaactgtcgaagttcttgaagtcacattcgcgtgcagtgcttacatcgaagatcacttctactttctcgcctgtcttgaaagagtatttaatgatttgcgtgccgtcagcgttcatctgcgtgtagtgttcaccatcaggcatagggattactccctggatattttccgggcggaaacgtccggaggtgatatcttttaaatcgagtgccttttgtccttgtgccattccggtcagacagagaaggcagagtaataaagtgatgctgatctttttcatctgcttttataatcggttttggttttaattcgtacttgcaaaagtaacaataaacttagattcaacaaagcctgaccgatttttatatagatttgataaggattattgggtgagattcaatatctttgtgaaaaggactttaaacattaccactatgaattcaaaaagaaaagacttgcaatatgcttctgtcttcttattggccgtggcattgacattcctgttggggaagggggataatctgtggttggtatcgtggggtgacttgataccgagtttgtttgtgctgttcatagcaggtgattgtttgcatagttccctgcttcgtatcaaacgcggggaagaggatggaggagcccggtggagtacttgtttcacttttctggtattcagcattgtttttatgggcgacttattctatatcggcaactttattgtgaataaactgtggggctaaaggggtagtagaaattctgtttcacaggtatttaatagtaagattttcttcttaactatagcttttagtttactttaactagataaattagtttatgaactaaaacttttcgttatttgcagtaaacaaagttgcagatatgaaaggattaacagcaaaagaagaagaaatcatgggctttttctgggaaaaaggccccttgttcgtgaaagaaatgttggctttctatgaagaacccaagccgcattttaatacattatctacgattgtgcgcgggctggaagaaaaaggctttttagctcactatacttttgggaatacttatcaatactatcctgtagtcagcgaagaggattttcgtaaaggaacattgcgaaatgtgattagcaagtattttaataattcttatctgaatgctgtttcttctttggttaaggaggaagatatttcgttggatgaattgaagcaactcattcacgaagtggaacaggccgataagaaacactaatctttttaacgaaaatctatgctatgggagttttcttcatctatatattaaaatcgtcagtttgtcttgttttgttttatctgtttttcaggttattacttagcaaggaaacttttcatcgtttcaatcgaatggctttattgggagtgttgttcttttcattactcattccttgtatcgaagtaactacccggcatcaggttgaggtgcaacaggctatgctttccatcgagcagttgctactgatggcagaatcggaacctacccctgttgaagtcggtgcagtgcaggagacgccggccatatcttgggtacagattgttctgctggtctatcggcgggtattctgtttcttgtctgtcgcaatatctattctttgatttgtctcttccggttggtacattccggcaaacatgagaagttggagaaaggggttacacttgtggtgcacaatcaggagatagctccgttcagttggatgaagtatattgtcatcagccggaaagacctggaggaaaacgggagggaaatccttattcatgaaatggctcatatccaccatcgtcattcagtagatttattggtggcggatatttgcatctttttccaatggttcaatcctggtgcatggttgttgaaacaggagttgcagaacattcacgaatatgaagcggacgagaccgtcattaatgagggtgtaaacgcgaaagaatatcaactattattaataaaaaaagccgttggcacaaggctctactctatggccaacagctttaatcacagtaaacttaaaaaacgtatcactatgatgttaaaagaaaaatcgaatccgtgggcacggttgaagtatttgtatgtacttccgttggcagctattgcagtaactgcttttgcccgtcctgaaatctctgaaaaaatggaagagatttctgctgtcaaagttaatgatttggcggaaattgtgcaagaaaaggtgctgcaagatacagtaaaagtatctaaagacgagaagagagatgatttggtggtgtccggtgtgaaatcgaaagaggaagaagaaattgttatttttgaggttgtagagcagatgccggaatatcctggtggtatgagtgcactgcaaaaatatctgtcggagaaaatagctggttctccgatgaagggtaaagcgggcggtagagtgatggtaggtttcactgtggctgaaaccgggaagataaaagatgtacgtacacttcagtcggatgaagcgtcattaaatcaggaagccgaaagaattgtcagtgaaatgccggattggattcccggaaagcaacgaggcagacctgtaccagtgaaatatactgtccctataagatttgggaatatcagatttgcagagaataagcagcctttgatttttgctgatggcatggagattagtatggatgctatggaaaagctggacccgtcaacaatagaaagtatatctgtgttgaaagattctacttcgataaaagtgtatggtaaacgtggtgcgaacggggtgatacttgtaaatactcaacgaggcagtaagactaaaatacagaataaggaaatcagtttttcacaaaaaacaaccagtacagatgctgttcccgattttccggttagtggaactgttgttgacgagcaggggcgtccgaaggctggagtcagcattattgtgcctaatacaaatcatggtacgataacggatataaatggtcattttagtctgaaagcaatgaaagacggcaatctgtggttctcatttattggatataagccagtaaaagcttctgtatcttctacgatgaatatacgaatggagcaggaagtggttgacctgtttcctgaactttcaggcagtgtgaaaaatggaaatacagggtttaaggtgaataatggtgtaactgtgcatgggataaaaggcgaagagcctttagtcattatagacgggaaagaagctatggagaaagatgcgttgtctaagcttgcgccggaccatataaaaagtatttctgtgctgaaagataaatcagcacaggttgtctacggagacaaaggaaagaatggggtgattattgtagaaatgttgacggatgatgaatatcagacccgtcagaacaaaagataagagaaatcatgtattgatttgttgacggaggtacgctagtatctccgtttcttgttccgggtggaaccattttatttcttcatctcttttgaaccaggtcatttgtttacgcgaataaatgcgggagttttgcttgattttgtctatagcaaaggggagttcccattctccgtccagatatttgaacagttctttatagcctactgtattgagtgaattgaggtgacgatagggaagtacggaacgtacttcttccaataatccttcctccatcatctggtctacccgacggttgatacggtcataaagttcttcccgatcacgagtcaggccgactttcagaatacggaaaggacgctgttttttttgttgggtgcgaaaagaagtataagtgcgtccggtcatatagcaaatctccaacgcatgaatcactcgcttgggattcttcagatctacaatccggtaatattccggatctaacagtcgaagttctgcgcagagttgttcaaggccttcctcttcatacttttgtaacatgatttgacgggtttccgcatcaacggtaggaatatcgtcaattcccttacagatagcgtctacgtacatcattgagccaccagtgagaatcacgacttcgtgttgcgtgaataatttctccagaatctccagtgcttctgtttcgtattgggcagcgctgtaatagtctgtgaggtggagcgtgccgaccagttgatgggggacacgtttgagttggtcgggagtaggagctgccgtacctatttttaattcggcataaagctgtctcgaatcggcagatacaatgcttgtctgaaatgtttctgccaagcgcaggctcaactccgttttccccacacctgtagggcctataagaacaatgagagtaggcatagatttttaagtattaagtatagaaatattaagtattaaagcgtacgggactaaaaaaatattaggtattaactgcttgacactacatagcaattaatacctaatacttgatgcttaatacttaaaatttttcttcttcgtatgggctgctagtgtcaccacctatgtcaaatccttcctgatcgaagtcttccatgtcgaagtcctggtctccatagaagttttcatccagatcaagagaaccgctggcagcggccatttcttcaaaatctaccgtttgtttaggagcatctcctgatttcttggtacatttggcgccatccatatcttttccggtgataatttcggatagttcgatgaagaaacaacgttctgttatgtaatcgaatacatatagcagtttctgtttttcatcttctaccagttcactgatagtagtgtctttcattacccagctatctatttccggattgtcgtccatttcttccaaggttacttcttttcctttttcccaatcgtcatcgcagataaagaaagaagtcatctggtcgtttgtgtaccctactgatttcagtattgcttcatggaagtcataaaaagtagcttccggatcaatttgtatttctctgacaaaatcgtcaacttcatcagatatgatagtaaatctgtatatcataatatgactattttgaactgtttatttaatgataccacgttctgaattacggatgaaatcgataatatagtcaatttccggacttttttcaaattcatcttctatttttttcaatgcttctgtcgtgtttaaaccactttgataaatgatacgatatgcattgtgaatactttcgatcacttcattggcaaaaccacgacgacgcaggccgatgatgttgattccactaaaagcaatcggttcgcgtcctgcgatgatgtaaggaggaatatctttactgaagcggcatccgccctgaatcattacatgactccctacatgacagaattggtgcatcaatacattggcgctgacaatcgcgttatcatcaatgacgatttcgcctgccatcttggtagagttaccgatgatacatccgttaccaaccaatgcgtcgtgtgctacgtgtacaccctccatcaataaattgttatttcccacaatcgtgcgccctttagctgccgtaccacggttgattgttacattttcacgaatcagattattatccccgatttcggctgtcgattcctcaccgcgaaacttaaggtcctgcgggatggctccgattacggcacccggaaaaatagtgtttctgttaccaatacgtgaaccatataaaatattggcgttagccataattttattgttgtcgccgataactacgttcttatctataaatacaaaaggcgcaatttctacattttccccaattttagcttcgggatgaatatacgctaaaggacttatcatgcttttaatatatcaattattacttatttttcactatttgtgccatgaactctgcttcgcaaacaactttctcgccaacaaatgcatatcctttcatagtagagatgccacggcggataggtgccagcatttctacacggaagataatagtatctcccggcactactttctggcgaaattttactccatctattttcatgaaataggtagaataacgttcaggttcgtctactgaattcaaaacgagtaaaccaccgacttgtgccattgcttctacttgaagtactcccggcataacaggttcttgtgggaaatgtccctgaaagaaaggttcgttagctgtgatatttttgatacctacaatgtaattagcaccaatctcaatcactttgtcaaccagttggaaaggatagcggtgtggcaataattcgcggatacggtttacatccattaccggctcacggttacagtcgtaacttggcgcctgtatttcgtgcaaacggatttctttccgcatttggcgtgcaaacttattattgatagtatgtccgggacgggtagcaatgatccggccttttatcggtttaccgattaaagcaaggtcaccgatcacatccaacaatttgtggcgggcacattcgtttgcccaaaccaacggtttgtgattgatatagcctaattgttcagcgtccatgtgaggtactctcatcacatctgccaacttgtcgaaactttcctgtgacatcttacgctcgtagattacgattgcattgtccaggtcaccccctttaatcaatccagcggagagcagcggttctatttcgcgaacaaagacgaaagtacggctggcggccacttcgtctttgaaattatgcatatcctcaagtgtagcaaactgattcggaataatggttgaatcgtaagaaaccagtacattcagactgaaattctcgtcaggaagtacgatgatagaagaaccagtcgtttcatcccggaactcaattttagacttgataatataaaagtctttgacggcattttgttctactgttcctacacgttctatttcttgtacataatattgtgcactaccatctaaaataggaaattccggtccgttaacctgaataaggcagttatcaatgcccaatgcgtagagggctgccataccatgttcaacggtgcttactttgactccattcttcgacaatacagtaccacgagtggtttctgtcacattgtcggctactgcatcgatagttggttgtccttctacgtcaatgcgctggattttatatccatgattgtccggagcaggattaaatgttacagtgagatcaagtccagtgtgaagacctttcccgctcagtgaaaagctatctttcagcgttttttgtttcagcattggttacttatttacttatttaatagttgttttaattcttctatttctttgcgcaaattacgcaattctttctgcatatccggtaagcttctttgtgcgacggatgctttgaagtattgcttcagttccataggaggagttccgataagctggctaccggatttaatgtctccgggtacacctgactgtgcacctaaaccaactttgtctcctattttggaatgtcctgcaatacctacctgacctccgatcatacaccattcaccaattttggtagaaccggcaattccggcttgtgcagccattacggtatgtgaacctatttcatcattatgtgctatttgtatcagattgtctaatttgacaccactatgcactaccgtagctcccattgtagcacggtctacacaagtattagcacctatatctactttatcttccagaataacaattccgatttgcggaatcttatcgtatccattcggagtgggagcaaaaccaaatccgtcagctccaatcactgcacccgagtgcaggatacattcgttacctatgcggcaatcatgataaacatttacattggagtacagcaagcaactgttgcctatcttcacgccgtctccaacaaaagtgtgtggataaatttgggtattatctccaatcacggtattttcaccaatataggcaaatgcaccgatgtatacgttctcaccaattttggcgctgggtgcaacgaaagctaatgaatctataccttgtttcttaggcttgctcatctcataaagattgagcaatttagccagactttcatatgcattgtctacttttatcagagtagttttaatttcgtgctcgggagtgaagtccttattaaccaggacaatgcttgattgtgtctcgtagatgtaaggtgtatatttgggatttgacaggaaagaaattgctccgggcattccctcttcaattttagcgaatgtgtgtaccgtagcgttttcgtctccaatgatttccccttggataaatgctgcaatttgcttagccgagaactccatgtctttaatttaaaatttaattagttcacaaataacggatttttttttcagatttccgtgttattgcatgaatattttatacttatctgtgtaatctctgatagcagagatagtatttctttacctttttggacaataatgagatgttcagcatgtccgatgcttcggcaatatttttgatagtgccgtctttgtagataatgtcaatactgtcatctgccgggtcatacatattcttttcgatgctgggggtagagacaaaatagttcgcttcggaaagggttatacctaattgctggctgatgtgcaaagttaattctttttttctgtcctcactaatcggttccgatgaaatttctactttaaagatatttcggtttatcattcccgtgcttaaagtagaaagtaccttgtctgtatgggtgctccacactttcaaggctgtccatatatcattgtcgtctagctggataaaattctccagacagtcggggttatgatagaattccgtaggattgatatcattgtaaaggaaaaaacgcaatgcgggtgatgcaaacagttccactctttgggaagctaattctttggcacgtaatagagtactaatcagcatcttttcgtatgcgacggatgtcttatgcaggtatacttgccagtacatcaagcgacgtgccgtgaggaaattctcgatagaatagatccctttggattcgataacgagtcggtcatccgctacatcaagcattttgataattcgggcggaaccgatgtttccttctgtcacgcctgtataaaagctgtcacggcgaagataatcaagtctgtccatatccaactgaccgcttacgagttgatgcagaaagcgtttcggatattcgtccttgaagatttggatggcaagactaagctgaccgttcatctctttgttcatccgttccatcagcatgagggaaatctcttcgtgggagactccttttactatagtatcttccagtacatgtgagaagggaccatgtcctatatcatgtaacaggatggccgcctgtacagcttccgcttcgctgtcaaaaataaaattacctttagaagccagttgggtgatagcttcactcatcaggtgaaaagcacctaaagagtgttggaagcgggtgtgttgcgcaccggggtatacaacagatgataatcctacctgcttgatgcgggtaagacgctgcaaaaggggatgccgtactatatcgtacagtaacccctttggaatattgatgaacccgaatacggggtcgttaattatctttctttcgtaaggcattcgttttctttagagatcctttttctcttttcagagaattgctttgagttgttcagccatttgcgcctgtacttcttgtgcggcggtgcgggcagcttctgcaaatttctctgttttatctacgtagatgataccacgtgaggaattaacaattaatccgcatgtactgttcattccgtatttacaaacttcttcgagcgagccgccttgtgctcctacacctggtacgagaaggaaatggttcggaacaattttacgaatatcttcgaaagcacgtccttgagtggcacctaccacatacatcatacggtcgtcactagcccattcttgtgatttacgtaatactttctcgaacagacgttcaccgtttacatcttctgttagttggaagtcatgtgaacctttgttggaagtcaatgccaacagaatcacccatttaccttcataggtaaggaacggagtaacgctgtcttcgcccatataaggagctaccgttacagagtcgatattaagttcttcaaagaaggtgcgggcgtacattgcagaagtatttccgatgtcaccacgctttgcatcagcgatgatgaattgatcgggatagttatctttgatgtattttactgtcttttcaaatgcgatccatccttttacgcccatgctttcatagaaagccagattgggcttataggcgatgcacaaatcagctgtcgcgtcaatgatggctttgttgaatgcaaagatcggatcttcttctttcaacagatgctccgggattttcttgatgtcagtatcaagtcctacacaaaggaatgattttttgcgctttatgttttcaaataattgttgcttatccatcttattatttactattatacaatttactattgactatttctaagaaatcattttcaactatcaactcttcatttttctaaagttcgctttctttcaagcgttccgcgttttctgctacgatcaggtggtcgatacagtcttgaatatccccgtccatgaatgcagcaagattataaatcgtgtaattgatgcgatggtcggtgattcgtccctgtggatagttgtaggtgcggattttagcagaacggtctccggtcgataccattgttttgcgcttggaggcaatgtcatcgatgtatttctgatgttccttgtcatagataaatgtacggagacgggccaaggcacgttccttatttttcggttggtcacgtgtttcggtacattcaataagtatttcttcggcaatgcctgtattcgggttcttccagatataacgcagacgtactccggattctaccttatttacattctgtccaccggcaccaccacttcggaaagtatcccatttgatttctccttcgttgatgactacatcgaattcttcagcttcgggaagtaccgccactgatgcggcagaagtatgaacacgtccttgtgtttcggtagcaggaacgcgctgtacgcggtgtactcccgattcatattttaaaattccatatacattatcgcccgtgacactacaaacaacttctttgaatcctcctgctgttccttcgtttgcattggagacttccatcttccaacctttggtttcacagaatttggcatacatacgaaagaggtcaccggcaaagatagctgcttcatcacctcctgcaccgccacggatttcaagaattgcgttcttgctgtcttgcggatcggcagggacaagcatcagtttgatttcttcttccaataccggaaggcgctcttgactattgtccatttcttctttcgccatctcgcgcatttcagcatccgattcattagcaaggatatttttagcttcttcaatattacccagtaattggatatattctttccttgctttcatcaagtcgtctaattccttatattctttagtcaacttgacataacgtttctgatcggcaatcactgccgggtctgtgataagggtagatatttcttcaaaacgggctacgagtccgtctaatttttctaatatggtactgttatctgccattctttagtatctaaattctccgaattcgctcttaatgattaattctgtttgctcacatgcttcaacacgtcctacaatctgtgccggaataccgaatgactcggaaatagcaattacttcttctgcatgttccggtgacaaataaacttcgaggcgatgtcccatattgaataccttgtacatttctgcccagtccgtaccactttgttcttgaatagttttgaataaaggaggaacagggaaaagattatcctttactacacgaacgttttcaacaaagtgtaaaactttggtttgtgcaccaccggagcagtgcaccattccgtggatttccgggcgcagtgcatcgagtaatttcttcactactggtgcgtatgtacgagtaggggagagcactaacttgcctgcatcaattggagagtcttctacactgtctatcaattttaacttgccggagtaaactaattcttcaggaactgcggcatcatagctttccggatatttttcagcaagatattttccgaatacatcgtgacgggcacttgtcaaaccattgctgcccataccgccattgtattctttttcgtaagtagcttgtccgtaagaagccaaaccaacgatcacgtcacccggacgaatattggcattgtcgataacgtctgaacgtttcatgcgacaagttacggtagagtcaacgatgatcgtacgaaccaagtcgccgacatcagcagtttcaccaccggttgcgtatacccctacacccatttcacggagttcggccagcaattcatctgttccattgatgatggcggagattacttctccgggaatcaacagtttattacgtccaatggtagaagagacaagaatattgtctacggcacctacacaaagcaggtcgtcgatattcataatcaatgcatcctgcgcaatacctttccaaacggacaaatcacccgtttctttccagtacatataagcgagagatgatttggttccggcaccatcggcatgcataatattgcaatattccgggtcacctcccaatatgtccgggataattttgcaaaacgcttttggaaagattcctttgtcgatgttcttgatggcgttgtgcacatcttcttttgatgcgcttactccacgcatcatgtatcgttgattactcatgagttatagaattatattgtatacggctgcaaaagtacagcttttttttggtacagccaactaggtactggcaaatgttaatcattaactattttactttagaatattctcttgaaaaggagaataataatagaaaattaagagttaaaatcatagtaatgaaaactgtgattttaactcttatatatataagggttttatctaatgaaaaaatgtcagaataaatatttcagataatatctagtctctctctttgtaaatcatttttttagaattctactttcggagccttctcactaccttcctctgcttcaaaatatgctttcttatcgaaaccgaacattcccgcgaaaatattcttcgggaaacggcggatattggtattataagcttgtgctgcatcattgaagtctttgcgtgctacattgatgcggttttctgttccttccagttgagcttgaagttccagaaagttctggttagctttcagatccggataattctcggtaatagctaataatttgcctagtgctgatgttacagcaccttgtgccttttgatattgcgctaacttttccggtgtcagatcggcagcgtctactttgatttgagtagcctggctacgtgcggcaacaactccttccaatgtttccttctcatgtgtcgcatatcctttcactgtgtttaccagattaggaatcaagtcggcacgacgttggtattgagtttctacatttgcccattgaccacttacattctcgtccatagtaaccagaccgttatatacacttactgcccatatgacaaggatagccacaacggctaagatgataataattgacttcttcatgtttcttgtttttattgaatttgataatttgttttctacttattttctttagaaacgagaaccggcaccgccgccaccgcccattcctccgccaaagctgcctccaccgaaaccgcctccgcctccgaaactacctccgccgaagcctccaataaatggaccacctccgccacctccccggtggtggtaatcattatcataactttgttggcggcgtatgatggtatgtccgcagtttctacatgtataggtaacatcctcggttttcaccccgttaattcgggatacgacagcacttccgcttctctgtaattgatgtttaccacaattcggacaacggctttgtttgcgtgccgaaaagaaagcaagacctccgccaatagcaataaaacaaagaatggcaagaacaaaatcaaaagaaccaccgctgttcgaatcggagagagcatcattttccatagaaccgtcaagccgctgacaagtcgcttttaggccggccaccattccggcatcccaatttccgtctttcaggtaaggaatcatatatctggtttgaatccttttacagatcgcatcggggagcactccttccaaaccataaccggtataaaactggatacaacgttgatctgtaaccaacaaaataaccaatccgttatttttatctttcttccctacaccccatttattaagtaactgatggcagaagttgaaacaatcttcttctccgattgatggaactacggcaaccaccgtttcaattcctgtttgttgttccaaggcataaagcatggagtctatactgtcacaagctgcctgtgaaagtatgccggccgggttgcaaacatattgcattttgttttgcaggtgaacttttgggaggttgtccaccgtgtatactttctcttgagcttgtagtgggaacagaagaaaagtagctaatataaaagtcaatattgatttcataacgattattttacgtttgcaaatatagaaactttttctgttatgaatctaaaactccttgttataataggtttaatgaatgtatcgcccgacgaatgcacggactcggtcggtgtattcctgtttattctctttgtatgaaactgcatgagccgctcctggaacaatccatagttctttgggtcccggtttggcttcgtagagcgaatataccatccaggtaggcacatacgtgtctttatccccgtgaataaacagcatcggaagctgtgatttggctacttgtttcagtgaggaagcctctttaaaattccatccatatttcttctcgcaaagccagcttgtggtatacatgagtggaaaagggggaaggtggaaactagctttaagctcatgtgagaattcgtcccatacactggtgtagccgcaatcttccacaaagcatttaacaaatggtttctgttcctcaccggacaccatcatggttgtcgcacctcccattgaaatgccgtgtacaaccatttgtgtactatctccgaaaatctcattggcaatgttcatccattgcaatacgtcccaacggtctttccatcccatctggatggctgggccttcactttctccctgatgttgcaggtcgggaagtaatatgttatatcctaaatctcgattatacagataaccaatcataaacatacggatagcattatctgtatgtccatgcacaatgactgctgtcttactggtgggttggggagcagcaacataatacgcatgaagttgtattccgtgcggattgatgatgaatgtatctttcagtgcatccacttgtttcaggctgtccacccatggacgtaggaaagggtagtttctatacatgaagggataagagtcagcatctttagacaaaatcttggcattcggagtcaatgaaaagtttaacatataaaaacttcctccgatggtgcagccggtcaatgccagcatgataataatgatgctatatacaacttttctcctcataaaaactctctctaatccttatttatgccatatctcccatgcggcaaatgcctggagcagcagcatttccagaccgtttttaacaacagccccttgtgcttctccttttttcatgaacagcgtaacattcggattatataacaaatcatagagcaaatggtttggagtcagtagctcataaggaatattagggcagaaatctaccttaggaaacatacctacgggagtacagttgacgatgattgtatattctgccataatttcgggagtcagttcctcataagtcagcatatcatcggctttgtgggtgcgtgatacgaatatactttcaatacccaggtttttcagcccgtggtagacggctttggaagctccgccggtacccagaatcaatgctttttggtgatgaggctgcaataaaggttgaatggattgagtaaatccgatgatgtcggagttgtagccaaccagtttgacttttcctttctgctggcggatgattttaatgacattcacagcacctatctttgcggtatcacggtcgagttcatccaaaaaaggaatcacttgttctttgtaggggatagtcacattaagcccgcataaattgggattctcttcgataacttccatgaagttattaatgctgggaatttcaaaattcacatactctgcattgataccttcggatttgaatttctcattaaagtatccgatagaaaaagaatgtcgcagagggtagccgattaaaccatatttttccataatcatttattgcttagttgggttattgggtttactttttagaagacgtactatttcttttactttaccgtcagggtatttgtctttatagtattccgtcaaatcttcgtatatccagaaattataagggcggccgataaagatattgaaagtgttagatgacttctcgccgtcaatgcctaatttcaattttatatggttgtatatttggtcgtcaggaggaataagtctgcaagttttggctatttcagtcgttattccatacataccatgagcttctgcttcttcgattgcgaattccttttttgttataggaaagccatcagaattgagtaatgtatatgtaccggagttcttttcctgaatagatatactgtatgattctccattggtatagggagatttactctctaaatcggcttttattttttctttaatttcgtccgtttctacatctatgccatattctacggcaacgatatcgaatttctgttcagattgagaggggggtctggtaattactaaaccttgtttctggtcaatttcttgtccgttcaggcagaatttccggtcgaatacgggttctttctttgatttccaggtcagtttactggaaaaagtgatgacagatggttcttttccatcattccagtctatttctactttctcattatcgaatgtatgatcgccattgaattctccgaaagtcagataatattttccgtctttgcttactcctgtttgcagacctgtgaaataggccatataagctctggtgcgttcgtttagcggagcatctttttcgtaagtctcccctttgtagatcgcttttattccttgattggcaatagagcctttggtgagtggattcagtaagtcattgccttgagcatcctgtactgaaatgtaaagaactatgggagcaaaatcccatattaggtcatctcctccattgtttgccggatcacaagaggtgaaattgatacaacaaaaaatgcagagtagaaatagtccaattgattttgttgttttcataaggttacattattaggttatttggttgcggtataaagagtgcagataccaaaggtcagccgtttgaagttgacttcgctaaaaccggctcgggcgatgactcctttcatgacttccccttgaggaaatactttgatggtgtccggcagatagcggtaggcactgttatctttggatagaagcttacccaataatggaatgacgattttagagtagatggaaaacagttgtttcatcgggaagcggtccggagtggtaagttccagaattacaagatgaccgcccggtttcagtacgcggcacatctcggagagccctttgtcgagatcttcgaaattgcggataccgaaagctacagtaatagcgtcaaaatcattgtcggcaaaagagagtgaagtgcagtcctcccgggcaaaagatattttatccgacagtccttccttttttactttttcacgtcccacattcatcataccttccgagatgtccgtgccgattagttcggcaggttgcagtttgcggcaggcgaggatggcaaaatcccctgtaccggtcgctacatccatcattcgctgcggttgaaaagggtgtaaccaggcaatagcttttttgcgccagctgcggtcgatacctaaagataaggtatggttcagcttgtcgtaggcatgtgcgatgttgtcgaacatacgttccacttgctcggtcttttttccttcttcgtcgtaaggcttgatatgttgttgcgggtaatccattttttagttgatagttgataaatgatagttgatagttgaagaagatagttgataaatgatagttggaagatgacagagttaatagttatatgcgataagctacatattaactatcatttatcatctatcaactatcatttattatctgtcatttatcgcttatcagctgttcaaaaaagtttcgacgtttttgaatatacgttcagcgatattgctagtatcttctttcacgaatttctcaccggtgatgttttcgaacaattcgatgtagcggtcactgatactttgtacgatagccggagtcatttccggtactttctgaccgtctttgccttggaagccgttttccatcaaccattcgcgaacgaattctttagaaagttgtttctgcggttcgcctttttcgaaacgttcctgataaccttcagagtagaaatagcggcttgaatccggagtgtggatttcgtccatcaggtagatagtgccattgtgcttaccgaattcgtattttgtatctacgaggatcagtccgcgctctgctgcgatttcagtaccgcgtttgaaaagggctaatgtatatttttcgagaatttcatactcttccggagtagccagtccttgttttaggatttcttctttagagatgtcttcgtcgtgcaatcccatttcagctttcgtagtcggagtaacgatgggttccgggaatttctggttttcgcgcattccgtccggcaacttcacgccgcaaatttcgcgtacgccgcttttgtaagtacgccatgcgctaccacacaggtaaccgcgtacaatcatttctaccggaaaaccttcacacaatacgcctaccgttaccattgggtccggagtagccattttccagttcggacagatgtcagtagtggcatcgaggaatttagctgcaatctggttcagcatttgtcctttgtaaggaataccttcaggaagtactacgtcaaaggccgaaatacggtcggttgctaccatgacgagtttttcgccgttgatgttgtacacatcgcgcacttttccgtggtacacgcttttctgtcccggaaagttgaaatctgtttttgttaatgctttcattgtctttattataattacaaattacaagttacaaataacaagtcgcaataggattccgaatctaaagacgattagtctttggccagtttcaccggacgttcgccgttgataaccagttgttcgtttttccgtttctcccgttcggctttcgcttctttgtcgaatttttcgtaagcatccacgatacgttccaccagtttatggcgtacgatatcttttttattcagttcaacaaaactgatacctttcactccctttaagatgcggagagcttgcaccaatcccgatgtttgtgaagcggggaggtcaatctgtgtcatgtctcccgtcacaatcattttggtgttcatacccatacgggtgaggaacattttgatttgctgtgtggtagtattctgggcttcgtccaaaatgacgaccgcatcattcagcgtgcgtccgcgcataaaggctaacggggcaatctggataatgttcaattccatgtattcctttaacttggcagcaggtatcatatcttgcagggcatcgtataaaggttgcaggtatgggtcgatcttatctttcatgtcgccgggcaggaaaccgagcttttctccggcttctacggcggggcggctaaggatgatttttttgatttctttattcttcaatgcacgtacggcgagggcgatagcggtgtatgtctttcccgaacctgccggaccgatggcaaataccatatcattcttggcgaatccttctaccagtttcaactggttttcacttcgggggatgataggttttcctgtgacactgaacacaatcacgtttcctgtctgttccgcttgcggcgcatttccttttataatgtcaatgataacttcttctttcagtgaattatattcggcgcagtacttttcaagtttggtgatattttcttcgaaagcacacatttcttcctcgtcgcccagcactttgatgacattgcctcgggcaactatgcgtagctttggatataaagctttaattaactgtatgttggcgttgtttacgccgtaaaaaataaccggatcaatgtcctcaagaacaatcagcttctctatcattaagttgtattaaagaaaaatttctgcaaatttaatgaaacgttttggattctctgattgtttggaggtgaattttactgcaatttacattcatcttccgttcatcgggcagtaatatggaaacaaccttgcttcagttcgtatttgatatagcatttttcagcttgtcgtagatctcttaaaacttcggatagaacaagtttcagtgtgtcggcactcacgtcctgcatagggcgaccgtctttatcttccactttcttaaaacgtttccaactaacatcaaaagtagccccgaaacaatgtgccgagttggcggaggcatttccattgcgacggcggagacgtttcacatcgttttcagtacgtagtacggaggtgatgattacctgattgggattcagccctttggcagccaatgaatcgagaaagttggagccgattgtatcgagcaatgcgctggcacgtggaacgaggtagggaatggaatgtgtcaatgaatccactgcataaaattcattatcagtgatatgagtcaacttttctttcatagcttccgcttcttctcggtctgccagcgggctaatacctatctttttagcgacttccagatgtgcatcgttcaaatcagggaaagaacgtttgtaactgacaacgccacgaatattgtgcggcttgttcaatttcagtgacatgtctttctttttgcagcttgaagtaagcgttgtaagcccaataacaagtaaaaatagcggtaatatgcgaagcttgtaagtagtcattttgtattttttgcccgcaaatatacgctattttttcatacgttctatgctttgcattattttccgcctcatatcttttacgggtcactctaaaatattttccggtatttccggacgggtatcaagagtgcctataatggtataatccgtgttatctattgttgtcttcagcgttggtattattaaataatcacttctagtaagagccttgttaataagttgctcccaatctatctttaaatatctttgtataagattgataactgcatttacacttgtaactccatcaaatagttcaaatcttaatttgtgaggggtgggaggggttgatgcatccgtgaaatttccttgttcgtcagatgcataatttaatgttaaataaggtatggcgtatgtaggagatgagttgccgaaaccattttctaatttgactgaaaaatcgtatgttcctttggctatcggattttgggatagttcgtttttggagtcgctatatcggaagaaatagcaatctttagattcattgttaatcaaatagaccacagtgccattggacagtgccggatgattactttcttttattgcgtatgccaaataactgtctataattttaatttttaattcaactatttcgttggtgatattatcttttactttcacctttgtttctcctttctttttgggggtaacttttaaacttcccattcctattgagctggataaatctacatcgatgcttaaaatatcagtttcttctacagtcacggtatagtctctgtttccacctctaatggtaatatctgttgctcttaataaaggttgttcgtaatactctttttcaaaggataaaggacctcaaatccgcaactacgcgcctaatatgatacagaagcgaaaagaatctgcatcgttagtaaaaagggggcacagtgcatcgaatgtcaccataaagacatataaatgccccttaccccaccatgcgacttgaggcaatacgcaaaatcacgactataagttgtcggtgttatccaaagtcattctggaacacattggcataagcattgttgcatgaatagatattcagcacatacttccttgatgtcctgacccatttggctggcacagagatgaacttaaagacaaacgtcttgatgcggcttgttgctttgagtccgaacctcttcacgtcaagcctcgccatgatgaatttatagaagttgcgtatgagtgccataagcagaagaaacaccgtgttttctcccataaaggattttggaagcctgttccagccgaatccgttattcatatcatcgaagatgcgttccttccctccacggaggttatagaattcgacaatctctttctcggaagactcgtagtcatttgtaaggatgcagcggtaggtgtattctccttcccacaggtcgagttcgccgtctatccgcttctgtctttgaatcacaagacggtatgccttccctttccatttctcgatgagaatggaggccagctcaaactcaatgccgcccaattccactttcttccaacctctgagggcaaagatgtcattgtagagcgaactgcatcggttagcacggatatagaaggtcttgcagtgtttagcaatctcttccactatctcttcagaacacgagccgcaatcagctctgaaacggttgataataagcttgttttgttcaaacctttcaaagaacctcttcagcgtgtccttctggtggaaacggacatttgtgttgccgtcgctgttctcaatgccgacaatcaagttgccaataaccgccacgccagggcgataaccaaggaacttcttgtatgtaggcttcgcatcaaacttctcagcctctatgaactggtggtcgaagtcaacgtcatacccctcgccctctttcagctgccctgtggacaataggcaattgaggagcagtgtattcagcttgtctgccgtgttgaagtcgtaggtcttgccagtgtcggatgtgtaggaaatgttatcctgggtcagttcctttatggctctaagaatcgtgtcggcactgcatgtgcgaagtgtcggatgaagcgaaaggtggtacatcagatgagtggtgacatcctcgatgcatgagccgccacaaaaataaacgctcataagcgaacggatgatttcgctgtattgataaccatacagcctgcatctcataccgagggttgagtcgattacagatgagagtctggagtcaaattgctccattattgaaaatattcctccaaaaggagtgagtttctcggatttaattgctacctttgccatgtctgtcgggtttgatacatattttgatttgcaacactaagataggtgaaaaatctgacatggcaaattcctgagcaactttttgttgctcaggtacttaaaaagttatatttgtaatagtgttgcggaattaaggaaggatatatcttttcttcattattattgccacagctaaaaaagataattgtacagaggaatgaaagtagtgctccaagtaaatgttttgttttcatgattattttgttttatagttttgcaggagagatatagtcttataagttcctgtgttgacgttggaggcaaatataaagattttatcgatatgttgaagtaaatagtgtatttatttcctgtcctccagctattttcatacatttgtagcggtttataaaaataggccactttcccactaaacataacacacatgaaaacagatttcgattacaattctatgcccgttagcttcgctcattgcttgaatggacattgtttgcgtgcggacaaatgtttgcggcgacaagtaactctccgaatgccgaaacagcgggctgctgtaatggttattaatcccgaacatgtcacttccgatggtgtagactgcacttactttattgatgaaaagccggtgttgtttgcacggggtatgaaacatttgctggatcgggtgccgcttgctgatgccaccgttatcaaacgacagatgatagcctactttggcaaaacgatctattaccgttgttgcaacaaggagcggctgattaaaccgaaggagcaggaatacatacagggacttttccgcaggcggggagttacagaaacgcctcaatttgacgaatatatagaatactatgatcttgggtaagtatatccgttagttccggtagtcccacatattgtgggaaagtattcttttatattatgggaatttattcccgcaaaataagggaataaattccctccagctagggaatcttttcccataatatatgggactaccggagactgtaataccctgataatagttgactgccttttttcttatcttcgggttgggttgacatttattatgtaggtattatatagcagtcccggtatgagaaatgcatgatgaaagtatgagaaataccggttttttatgacatttcaggcaaaatattatgagaaacagctttttgaaaagtatttctcatagtgctattgctttgaattacaggtaattattctatggattatgagaatatgagaaatgattttgcaaaatcatttctagtggcgcgacattccgggattattgtaattgtatacaaagaatgagcgatatggcttcacgacttattacatattttgtgttacatattttatgtaacataaagaacgtaataaatccggaatgttcaaagaagatttattcgagttatatataaaaaacaaacgctgatgagaacaagtaatcatgcttttctcatcagcgtatattatgttggattacaactatttcttatcttttttctcgtcagcttttgttgcaggcttttcctccgttttgctttccggattgataatacccttcactgtttcaccgataggaagcttgtccaatacgccaaggctcggagctactgtctttactaatgtgttcaggaaattgctagttccaccgtttcctccgtcgaatacagtgatatttcctaggttcatgtgttcgaacgccttcacctgttcgccggcgatttccttccactggtctaccatcttatattggatagcgatagctggattcgattcagctgctcttaccattgcttcgaaaccttctgcttccgcaagtaatgatttcttcttaccttccgcttctgcttccagtttcaattggatagcttttgcttccgcttcggcttgtgctaaagtagcctttgcgcgtgcttccgcttcgcgggtaatcttttcagcgatggcatttgcttgcaggatagcttcctgtctggcgatttccgcaggaacaatcttttcagccttcaatgaagattccactttccgtgccttagcttcttccacttccttttgcgcaatttcgcgtgcagtttgtacggcagcttccgattttgcggcagcttcacctgcttgcttatcggcattagcttgtgttacagctagttctgcattggagagtgctacctctttctgtgcgtcatttcgtccgatggcagctttcttggcagcttccgcctgtttgatttccatatccgagtttagttcggcaacacggctttctttttctgtatttgcctgctcgatacggatattcttttcagcttcagcctttgctacttgtgattctttttctgcattggcaatggctacttgtgagattctgtccttatctgcatttgcaacggagatttcttgtagttttttggtttctgcaatagcaatatcctgatctttgcgggtttctgctactttcgtttcacgctcctttatttgattagcaattttgatagcacccagcttttcctgttcttcgatgttagcctgtgcctcgttcagtgctttactttcagcttccttacctaaattgacaatgtagttggcagcatcgcgaatatcactgatgttgatgttcatcagatacaaaccgaatttgcgaagttcagtatcaatattatctttcactttagccaggaacttatcccggtcagaatttaattcttcgatagtcatatcggcgatcaccatacgcatctgaccatatacaacatcagtaattaagttctgcttgtcatccatcgtcagacccagcatacgttctgcggcattctgcatcacttcgggatctgtgctgatggctacggtgattgtagtcggcacatctacacgaatattctgagcggatagcgcaccggtcagtttacattcgatctgcatgggtttcatggacaggaattcgtagccttgaataataggccatacgaaggctgcaccaccgtggtatagttttgccgactttttatctcctcccgttttaccatatacgacgagtacctcgtcactcttacatttgcggtaacgggaaaggataccaatgaaggtaagcaaaatgactgccactaatatagcagccattatcaacatttcttgtgtcataaaattatgtatttgaatagttattgaatgaacagtgttccgtctttgtaactggtgatgattgttcggtctccagtctggtatgtttttccggattcggagatgacgtctacttcacgcatggctccgtcccgggtggtctgtacagtatatttgctgtcgctttgcttgaagtagatggtacattctcgtcccacaagttgatctgtctgttcagaatgatttacttgttgcagttgataagctttcttatagagaaaccacacagcgagaacaaagaaaagacccaccagaattccgatgacataactttgaatttcagtgtttcccgctaaatacatgtaccagccgaatccgattccaaaatgagttagtcctttaaaagaaactacgctactgatgtcagcatctacgtctacatctgcatctatgtctccgaaaaagatggatagaacgaattggattacaaatattcctgttgtcacaagggcaataataaggaaaatggtactactcataattgtgaggtattagtgaatcatgattattttgttctccaaatatacaggtttatgcgaattatacaaagataaatgagataaaatgactacttttgcgcgcgaaaaccctaaaaaagaggaattagcgtgcaaaggtattttatttatttggcttacgacggaaccaactatcacggttggcagattcaaccgaatgggattagtgtgcaggaatgtctgatgaaggcattgtctacctttctgcgtcgcgaaattgaagtaataggagcaggccggacggatgcgggagtgcatgcctctctgatggttgctcattttgattccgatgaactgttggatactacttctgtaactgataaattaaatcgtctgctacctcccgatatttccatttatcgtgtttgccgggttcggccggatacccatgcccgttttgatgcgactgcgcgaacttataaatattatgtgacgacatcgaaatatccttttaacaggcaatatcgctggcgtctttataaccagttgaattatgaacgcatgaacgaagcagcgcgtatccttttcgagtacaacgattttacgagtttcagtaaacttcatacggatgtaaagaccaatatttgtcatattactcatgcagaatggacgcaggaagaagatgctacctgggtgtttaccattcgtgccgaccgtttcttgcggaatatggtgcgagccattgtaggcacgctcattgaagtgggacgcgggaaactgactgttgaaggtttccggcggattatagaacagcaggaccgttgtaaagccgggacatctgctccggggcaagccctgtttctggtcaacgtggaatacccggaaagtatatttgaatgtgatgaccagcaatcatccataaccggcgaaccgtctgtcgctgataacttataattggtaattagtaaataataaatattctcatgtggttattattagcattcctctcggctactttgctgggcttttatgatgtattcaagaagaaatcgttgaaagataatgcagtacttcctgttttgtttctaaatacattcttttccagtctcatctttctaccgtttatcctgatatccgtttatcaaccggacttgttgggaggaacaatattcaatgttcccgttgctggttgggaacagcataaatatattatcatcaagtcgttcatcgtattgtcttcgtggatattcggatatttcggaatgaaacatttgcccataaccattgtaggacctatcaatgccacccgtccggtgatggtgctcgtgggagctatgctggtattcggtgaacgattgaatctctatcaatggattggtgtgatgctggccattgcctctttctttatgttgagccgttcgggaaagaaagaaggaattgattttaagcataacaaatggatcttttttattgtactggctgccattacaggtgctatcagcggattgtatgacaagtatctgatgaagtctctgaatccgatgctggtacaatcctggtataatgtttatcaggtgtttattatgtgtcctattctgttattgctttggtggcctaaaagaaagtctaccaccccgtttcgctgggactggacgattatcctgatctccattttcctttctgctgccgattttgtttacttttacgcattaagttacgacgattcgatgatttctattgtttcgatggttcgtcggggaagtgtggttgtttctttcactttcggtgcgcttttcttccgtgaaaagaatttaaaaagcaaagcgattgaccttatactggtgttaatcggaatgatattcttatatttggggtctaaaagttaaaacagttacacaagactgtttgtcataggttaaataagatagatatgaaaataaataaacttgttattactatattcttctctgctgtcggactttttgtttcgactgctcttcaggcacaagaggccaaaacgttgtttgtgaatatgccggattctctaagtcccttgcttacaaaagtgaatcgtgaagattgcatagactttctggaaagtaagatgaaagcgcaagtagaaaaccgttttggcaagaagtcggagatgactgatcttagcaaagactatatccgtatgcaaatgtcagctcaatcgacctggcagatgaaagtgttggcattaaatgattcaacgaacgtaatctgtacagtctctactgtttgtgctcctgcctgtgatagcagcatccatttctatacggacgactggaaaccgcttacaacatctctctttattaccctgcccctgatggatgattttctgaatgctcccgattcagcaggagtttatgagtttgatgaagcacgccgttcggcagatatgctattgatgaaagccgattttaataaagaaaatacggaactgacacttacgttaacaacccccgactatatgtcaaaagaaacagcagagaaactgaaaccgtttctccgccgccctgtagtctaccattggaaaaatggagcattctcaatttaataagcattcgttgatgaacgctatcatttccggtgtgtttgcttccacactttgaagtaatttgaattgtgctttggtgcgaacgaggttatgttccggatatttgattttataataagtatctccgttgatataatctgccaggaaccgtacacactgcatgtatgggaataaagccgccgcataaggaagattctcaatctcgatctgagtcaggaatgatttggctcctttcagatagcccttggtaaatgctttgaatatttccatattgaagtttacacgatcaaggtctttgtcgtcttcatcacctgtgttggcacctgtacgtaagaagtcaccataatcggagaatataaagctaggcattaccgtatccagatcaatgacacaaagcactttaccatcctcgtcgaacatcatgttattcactttcgtatcgcaatggcaaacgcgtttgggaagtttcccttcacgatataaacgttcagccttacacatttcatctgcgcgtttctctatttcatccagatagtacttcacttctgctacccgtccggcagcatccttcgcaacggcttcacgtagttgtttgagacggaactccatgttgtggaaatcgggtatggtttcacccaatgtttccggaatatcggccagcatagcctggaagttaccgaaggcttctcctgcataattggaatattcgggatttaccgtctcatacgtttttgcacgtgggatgaataccatcacacgccaataactgtcaccgtcaaaccagtatgttttaccttcttctgtttcgaggaaactcaacaccttgcggtctatatccgattctccggcttccgtcagtttcttgcgaatgtgattggtaacagcgctaatattggattgaagcatttctacattctggaaaatggcatgattgatgcgttgcaaaacatagtcgggagcatctgcttctttggtgtttactttataagtgtcgttgataagtcctgcacccaaaggtttgatttcttctatcgtaccttggactttaaatttagctacgatgctagataaatctttcatgttttttttctttaaaaatttatactaaggttatcgataatcatatttagcagcttcgttggcctggttagccgagcgaacgggtactaatgtgaagccccactggtaatcacggttagccgggatctggtggaaaggttccgggcgagcaccccaactgtcatatccgcctactccttgttgcttcatatctacacaaacctcaacgaaatctctgggagtgatgtcgttgacatgatgcattctccgtaatacgttgcgggcagcgttctcgtcgtgattggcaacctcttccgggctgaagttattccattggtaagggtggggcagagcttcttcagagtcaaagtcttcgatagagttgcgcaaggcattgaaaccgataagactgtccgctaccaacaccaggccgtttcctttattaggagataaagcgatccaacgggtatcagtgtgatgtccgttttcctgtggacgcacatagttgaagtacatttgatccgctgttgtcttatatacgccaacgagcgttccgtgattgcggtcgatataattctcttccgggccacggccaaagtattgtacattgttcatctgtgccggcaagcggaaacgcacaccgatacgggggacttccagtttggaggcagccttacgggcagcatcacttccgggggtaaatgtagccatgcgggtagcttcggaaacttctgtttctgtaggctgcatatccgttgatgtgaatttggcatttacgttaactattccgttcggatagattttgtaagtgacaacatacaagttgccggcagccagtaagtaggttacatttaaggagactgctttatcttctgctgtcatggtggcatccgttatgcggaagtttttgcttgattgtttccatacctgcaaacgtttaggagtgctgttaccatagtcattatcattaggagcacgccagaagttaggctgaataccaaatccgtctttgaaatattctgtaccatctactttatacgaggttactaatccgctattcttgttgaatacaaagtttactttggaggaagaaacgattaattcatctccttgaatcgttgttttcaatgccggaccgtttgctttatatatactcttctctgcctggataggaagttggaactggtcgtatgcaatttcatatccggttggaatcaacggttcaggctctgtggttgttacactgaagttgacaaaatattctgttcccggttgggctttcagaccatttaccggtacggtgaattctttagaggcttgcggagcaatatccaaagatacttttccaccttttattgtctttccgttagcaagtacattgtagtgaatctgatattttttcaggttagtgaaatagaaacggttggtgattttgaatataccggctgcggcatctactgcttcaaaacctacattctgatgtacatatttcacttcagccattgccggatgcggaccacgatccggattgacaagaccgttgcagaggaagttaccatcgctaggtgcgtctacgccgaagtcacctccgtaggcccagtattctcttccattcttatctttttggagaagaccttggtctacccagtcccagatatatccaccttggagattcggatatttgtaaattgcctgccattgtccccacaggtttcccgtggagtttcccatggcatgtgcatactccgaaggagctacaggacggtcgctaccattctttccgatattttccagccagtcggcacccggatattgcggaacatacatatcggagttccattcccattgagcacgttcgtagttgaccggacgatccatcagatctttgtctgcctctttcaaccacaaataagtctgatagaaattatatccgtttccggcttcatttcccagcgaccagaatgtaacgctcggataattcttattacgttcaaacatattgatggtacgatccatgtgcggtttcagccattcgggattgttacccagtgaaccgcctttccggagatcataatacattccgtggctttccacgttggcttcatcatatacataaagtccgtattcatcacaaagctcatagaaacggcggtcttgcggatagtggcaaaggcgtacactgtttaagttatgttgtttcatcagttcgaggtcacggcgcattaaatcctctgtaacataatgacctgttgacggattatgttcgtggatatttacccctttcagtttcagaggctgaccgttgatgaataagcagacatacggttttccgttagcagccttctgttcgataggcttgatctcaatccggcggaatcctacattgaaaggaatgatttcattgattttgccattctcttttactgtcatcaacagtttgtatagattcggatgttcggaggtccatgtgctgacatctgtcagattcttatcgaaagaaagtgtacgtacttcgttcgatggaatataggctgtcttctcttcagtagctacaacttttccttgtgcatctaatagttcataaactaatgtaagattagttgcagccttttcgtgatttctcaaatcgacatttaaaccgaagattccatttttgtaactgtcgtccagcgtagacttaattcggaaatctttgagagctgctttaggctgtgaatacagaaaaacatcgcgttcaataccactcatacgccagaagtcttgacattcaagataggaaccggtgctccaacggaagattttaactgtaagtatgttctttcccggcttcacgtaattgttgataagaaattctgccggattcttggagtcttcgctatatcctacttcttgtccgttgatatatacatatacgccggacttagctcctgccaaatgcaagtagatatcccgcccgtcccagtctgccggaatatcgatgtcccggcgataaactcctaccggattggcttcgggaagagtaggaggttgtggattgcgcggtttgaattcataaccatgattggtgtagatggctattccgtgtccttgtacttcccagttgccgggcacctgaatatcatcccacgaatctgtattggtgttcggatcggtaatgttttcgggaagttttttataagagtctacaaagtagaatttccaggttccgttcagcaagcggtaatacttgcttcgttcgaacttgccactcaaggcatcagcgcgattgttgtatgtcataaaagaagtacgtggatactctttgttgacttcaactacctgtacgtcctgccaataaggtttcacggctttctcagccattgtactaagtgttgtcagggaaaatattcccatgaaaatgcctgttaataagttgggggttggtcgaaatttcatgtttctcaatattggtttttcatttcttttttattttactttgatatgatcgaatccttctccatatactccaatgacagcactctgcgatacaaatgcattcgggtctatgtcttttatcaaccggaagatgataggcgattcccttttcttggctaatacaaacatcatctttacttctcgtcctgtataaaagccggttgcattgataatcgttactccccggtgcggatattcgttaatatgccgtccaatttcttcatatttgttagatatgataaaaaactgtacggattggcgggcgctattcactcctggtcgagaacgaaactacaaatataaagagttacaaacccatacaccactttttcccagtcttttaagacaaaataactggaagaaatgataatcatatcgcagatgagcacgactcttcctaatgtgatgtcccggtatttgttgatgatggctgcaataatatctgtacctcccgtacttccattagccgaaaaagcaacacctatgccgcctccacagaaggatgctccgatgacacatgccataaagggctggtcgtggagaagcccgaaacctgccgtcaatttttgaatgacggacagaaagaaggtgagggtaaatacaccaaaaatagttttgatgcaaaactttagtcccagcaacttgagggccagtagtagcaagaagaagttgatgctgaagtacgtatattgtaccggaaaacctgtggcccaatatacgatagaagcaatacccggtactcccccggtggtgatatcgttaggcaacagaaaaacggtccaaccgataccatacaaaatcatgccgatggcaatcattacataatctctggcttcacggataatgctttgcttagaaggctttggaatagctgttttcataaacgtgattatgataatctataaaatgttcaaacacgaacccatgaataatccggctttagaggagaagccggattggttcattatgctcgtgctaaaaggaaatatgctgttttattttgcaaaagcgtgacggtagccttgtactttattccatccgccgcgagtgaagtcgggtacttctaccggagctgaattgttctcgatagaaagtctggtaagttcagccatgcaacaccattctgccaggtcataaacgtccatatccaatggcagtccattctgcaagcaatatgccagacggtagtccatgataaagtccataccaccatgtccacctactttcttggctgtttcttccaactctatatgaataggatctttatatttatccatcaaggctttttttacgttttcaggtacagaaccatgtgcattcagattctcatgattaggcacatcttttgaatcaacttgtgaaggtcgcaggcaatattcttcaatcggatatttgcttgcgtaaccatcggctcccactatctgatacatacggctgtatgggcgtggagtcattacgttgtgctgaatcaacattgttttaccgttctctgtgcgaatcagggtagaagtctggtcaccattctggaagtcagtcacctcttctcctgtttgtttcttaatataagccggtccgttgacagctttcgtatccatcgataccaatgttttcatgcggtcaccacggtggatattaagtacctgacaagcagggcccatgccatgggtagcatatacatcaccgcggtgtagatgattataatccattcgccagttattccagtattcaggccagaaatcttccagattatggatatatgaaccttctacatgaagtacttctccgaatacgccttgttgtgccatatttaaagaagtcagttcaaagaagtcatatacgcagttttcgagctgcatacaatgcttacgtgtcttttcggaagtattgattagctgccagatttcatccagtgtcatggcggcaggaacttcgatagctacatgcttaccgtgttccatggcataaacacccattgctgcatgatgtttccagtcggtggctatgtataccagatcaatatcgtcccgttcacaaagttgcttccatgcctcttccgagccactgtaagaagcagcttcaggaagtccggcattcttcaaaatttcttgtgatttttcaacacgttcgggaagcaggtcgcataatgctacaatcttagttcccgggatatgggtccagcgtgccacggcaccaggaccacgcattcctaatccgatgaaaccgacacgaacggtatcaattttaggagtaacgagttggattacatcttcttgtccggcagggcgggcaggagtttctactttgataggagtaaaggcttcgggagcctttggttgtagagtacaactggtgtgccaagttaacaaagccaagccgatagccgtgactgtaaatagtttcttcatcatattttaaagtttttaataggggttattcgatgtttttcatttacgtgtcaaaaatagtaattaattagccaactatttatatttataatcgatattttcatcataaaagtttctattatgaggtaaaagatgagtctgactttttctacctgattttgtgtaggcttatgtgatgtcaaatacatataaaagacatgccataaaaaggctcttcctaaaaagaagtcacctttttagaattgcttaacgtttactgctcctgttggggtaaactacctacttcgtctgtacttctgatagaacctagtatttgtattttttccaggctcccctggtgaaatccggtatttctactgccatgctcttattcagtacagatttttcacttagttctgtgatacacgaccattcggctgcatcgtatacatccatatccagtggaagcccgttgcgcagacaatgaataaggcggtaatccataacataattcatttcattgggtaggcctctgcgatgtgcttcttcgccaatggttgcgctaaaaggatgtttatagcgtgccatcattttttctagcagttctccttcaagtggagtgtctccattaggatctagggcgatacaggggacagggtatttttgggcgaatcccagtgtgccgcatactgtttgaaggcggctgtaaggacgtggggtggatatgtcgtattgaagcatgattgtcttccctttgagcgtgtggataagagtggtgtttacgtctcccaattgatatttctggtgggcttccggtgaatattcgccgaatagtctgcgggcatactcgctcattcctgcctgatgagtagacatggacacgagatattccattctgtcactgcgatgaatatccagtatctggcaggcggggcccaacccatgagtgggataaggattgcctgtatgttcgatgctgtatctttttccccaatggttgtgatagccgccttcgctctcttcggcaaagtacattgaacgaagatcgtgaatgtaggctccttctacatgcatgatttctccgaacaatcctcgttgggccatgttgagaatcattagtgcaaagggatcataacaacaattttcgagcatgatgcagtgtcgcctggttttttctgcagtgtctaccaattgccaacattcttccacgctcatagcagccggaacttcaatagctacatgtttattgcattccattgcgaaagttgccattggagtatgcattaaccagtcggtgcagatgaatattaaatctacttcatccgattcgcacatcttcttccatccctccactccggtatatccggtggcttcggaacggtcggcttcttttaatagttgttgggccttacttagatttccttctcttatttcacaaagagctttgatttctactccttcaatttgcagataacgttgtaaggtgagcaatcctcgattgcccagtcctataatcccgatgtggacagtggggatagggggatgtgctagtcggagtacatgcgattgtaccggagaatttttcataattctggaaaacttctgttattgccttatacaaaagactttgggagaattacccgattttgaggtaatgacttggcaactgtgcaatctgctgcgttctaccttgaattgcttacaaggaactcttattttgttgcaaagatacgaattttacttatatataaaaagcactgtactatttattatgtctcttagatagtacagcacttgaatatttgtctaatttcttttgatatagaaaaaatgttttaaaggctattctttgtgataagaaaccatatctcccttatcatttcgatacatctctatataatccaaacaacttggctttaatgcgccattaaagtggaaaacaaatgttcttcttccatcatttgattcacaacgtagagttgattcatcttgttttgttacacgtcctacaacaagaggattgtatggcggtatcataaattcaaacgtgcccttgctaaatttgtagtagatgtctcgttgggttggactatctatagttttttctccatttctccataaacagtttcttggtgaactaaagtgattataatcttgccctgaaccgattttatgtgctcttataaaatagctcttcacataactaccataatcagaacacatttgaatattcattttataaccattaataccataatcccgttcttctactccatagtgtccttctccatattttaccatgtatgaaaacaccttatcagcaacattgaagtttcttgatgggatcttatcaataagaccttccgagaagtaatctaattcaaagtcaatctgataagaacctttcagataaagatatgctgcaagataaatagcttctgcttcaaggtcttttgtattaagaggcatgtgttttttcaggtctgttacactttcctttacatattgttctatagggtccatagatggagcttctgattgcagaactgactttatcgtagattcagacttacaattgtttacacttgaagatgattgtgaactcacatttttatcttcctttttaccgaataaaaattcaaaaaaatccatgctatttgtatgatttaaagtttaacactctttttcttgtttctttgtaattgtacctacattcatattgcaatatcttaaataaagattcaatattacgacttgttaatttgccatcctccgcacagattcctgtataaaacaacaaagctattgattttgcctgctcgtgttttgctgatacaatctcattatatgttttttcttcaatatcaacatatcctcccgtatcattaggtctaatagatgcgtgttgataataggtaagtgatttcatattatacttccatcccgaagatattgatatttgggttgctaattcattacaataatgcgcatagtacatatcagaaatgtacaacaagtcaggattgatatttattggaattatataccttgccatagaatccatagcaatagatgccctatttacataagcttcctgttgaaagatttcatcatttgttgtacaggctaatttcgtcaaatatagataatcatatgaataaatctttctatatagttccatatggtttttagggcacatcaatagtaataatctaaaagtatttgctgccccagctaatccataatcactattccaatatcgattcgggaacattgcaagttgatttatacttcgataaagataatttagcccttcttcgaacttttgcccatacatatacatacctgctatatcagcaagtatatatggatgctctgtatctttaaattcaaatatgatagaatttaatacaaaagtaggaatttcatataatgctaatgaaattccccttgtacgccaaggagaatttaaatctttgaatttaggcttgtcattttgtgcattttgaactttgaggacataattatccacaaacgaatcatctatgcacaaacttctatcaatcatagtaatttcagacatttcataattcttacatttattgtgtagatacagtcccaactctttaagtaaagatatgatatactcattgtgtattttatttacataaaaatcaaacatcataggaaagagccaattgccctttttctcttgaaaacaaatgggatgttcatgtgcaaattgactgaacgattttgggtcagcagactcaattttctcaaggagagttttgatgtaataattttcttccatacaaagaacttaattatcaatgttatgatagattttctccctgtaatgttatcaaccgcttcttaacagtcccgttcttacaggattttactatagaaattatgacttcatccatacgtggcacttccaattttctgtattcatttgtatcatcacagaaaaccacaagatacatcttttcgataattatgtcataatttctttcgagaatatagcgatataggttctgttgaatacaataatgccaatatggcgtatcctcaatttgattgagttcacctaaccctttctcgccatagttgtttacagcaatcggtttaccccaaaagtcgacaatgcgatgactacgtttccaatcatatatgtcaaaaacatctccacgtttatgtatcatatctattgtaccagcaatttttagttcgtcatcatatatagcccattctgttctaaacggtttaaatttgtggttttcgagaaactctatgaattgcatatattcaagttcaagagaaatttgttcttctatgtgaacatattttccgtcatatttgaaagagaattcttgttgatatggaagtcccttataatagttttctatttgttggtgcataaaagttccgacatcacgtgaacacgcaccttttgaatcccattcttcaagaatctgtccttgtgatatatttcgttgattagctttatattctgaccaatagtatgaatcaaatggcttaaagaaacaagatatcacactgctgacaggaataaattgttcctgtccatcatatagataaatatgttcttgtggatagaattgaatatgaacgtctttttcgcaaaaaacaggttctcctattttatagtttacttttctatttgaagaaaacaccaatggtttcattctcttggcacaaaccctttctttttccgtttgtgttatgtctgcaatttcaagtttctcattgtcaacaataccaaattcatggttcaagtatttctcgcgagtattttcacttgccataactttggcttcgatttctgtccatcgttcaatttcctttggagtagaacatgagagaaaatcgattggtaaaaccatagagggttgtatataatgaagaacttgtgctataaaagccgcacatcccttaggattggaaaaaacttgatattcagtaaaacgaataacaatccatccgatattattcagaagtgcatcacgaaaatcatctccacatcctatataatgtataggttttcgtgtaaatgcagcatatggttcgtctatttcaatgtctattcttatagatgggtgctttttgcatataatcgctatatctggttcaaaaggcctgttatcttctacaggaagtatattgcaatcaccgagtataagtaaatcacatcccctgaaagtatcttgtagataattttggaatttagcttcactgaaccctcttcttgctatagcttttcttctgtatggaaaaacaatacagccatcttcaggatatttagttactggatatttccagttactcttatcttggacaactgatggcatcaaataatcaacatattgaatatcaaaatcatcaaccactccaacagcataatcactttctatttttttctctgttttgcaaatgacatctatcaattctttatctacgcttttagacaaagcaaaatctttaaccttcttgactttttcttttgccgtctcaatatcagcagactttaatgcattagaaatagaattgatttcatcttttatttgtttttgttgctgcacttctatgttctttttatcaatgagtttttgcatctcttcccgagaaaactctttcattaaagaaatataaacaatacagggcttttgatgcttaaatttctgtattacagattcgcatctttttacaaacaagtcttgtgttgttactccatcaataatgacaacatagtttgaagataattcatctatatgatggagagcacatgattgaaatccaagtacagccaaatcaagagttaaaaactgaacttgaagattttcatcgaattcagccccatatgcgattacttgcacagggacacccaatgattttataaagttactaatctctatgttgatataagaaggggtatttatttttccctccttatatttatctatattaatgttattctcttgcgtctgtttaaaatgagtgtaatctaaatcggttgcagtgcaaaaacttgaaaaaaagaattgccatatgcgatattctccttgtatgatatttcctttatagtcggttttttgaaaattcatgttataaaaatagcaaccagaatgtggcgttgtagattttttgctacgacataacttactaaaagctatttgtgccttttcccattcttcggtacttaaaaactctttttgccgcctatcgaaatctattatttccgtaatattacttattattattgatttgtttgcagaaggatgttctttttgccaacaagtaagtccatctgaataattggctttaatcatattatattcagttgatacctgcttttctcgttgtattctttccaattcgagcttttctctcttttcccattcaactttagggaatgagaggaatttgtttatatcttgttttgtaagattgttttcagactggaatattcgtaattcttttcgaaagaaagagtatgcattaggatatatatctttttgatgcttaaatttctttattaaacgcttggttgataaatttgatataaatataaaagctataagaatggctattaaaattcctataattatgcatacgactttaaaaccttgagtaagtccccaaattataagtgctagtagggcatatccaatacaaccccattttttttctaaatccataattcttatttataaatatataaagcgtgaactgcacagccacgtctttatttggaggtcgtaggaaaccttgcatacagatgtagtaatagcagcccacgctatagcgtgagaaccactatgccatctgagtatgcaatttgaaaatttcctacgtttccaaatacttgatgcgcataacgcttctttcttatctaatatgttttggaaagagttacctcaatccgatacaaaggtaagaaaaatccgtgatctgccattcgaacatcacggatttttttgatttacagtttcatactcctattctgtcttggtttcggtattccgatagcttctctaaactcattcattttctttctgaaccagctcacgtgtgaaaccccgtctatcttgaaatcgaatttaccgctttcatcctgtttgatggagcagacggagtgtcgggtatcaaaacttcggttaaattcggaagaatagagttcgccttttatcccgacctccttgaactcgcacagtcttctgattattccgtcattgaacttcaatcggtcacgcaggaagtttattataggcatcagcttctccacatacggaaagtagcgtctgacaaaatccgcaaactccgacagcttgcggtgctgttgctcgtaagcgtttcttatctcctgtatctgtttggcttgttgccgttcccgttgtcgggcttcgttttcaagttcaaggatgcggtcttgcaaatcctcgttcctgcgttccaacgatttcatctttccacttccgaaaagagaacccacactgtttgcaagggcggttgccgtatcagtggctgcaattttgagcttgtcggtgcggatttctgcttttacctgtttcagttcctcctgcgcctcggctttcttctcctgtaatagtctggcttcggtttcaagggtttcattcttctttttcaagtcccgataatactgcatggtggtagtgtgccgtgcttccgacccccgtaccccacgttgcaatccgtatttcgccatcacccttgcgtaattgtcgtggtaggcaatcaggctctgtcggttgaacaggtcgtcggcacacaaacggacggaatttgttttcttgcggtacttgcgcttgccatcagcctgttctttcttggctttgcgcctttcacccgtcacgatgggaacaacggctgcatgtatgtgcggtgtcttctcgtccatgtgtagatgggcggcaaccacgttgtctttgccgaatgtggcttgcagccattggatgctgtcgctgcaccattcatcgagctttcctttttcctgtatgttcatcatgtcctcgtgcgtacccgacaaaaccacccggacaacacggacttggtcgtgtgtgattttccgtttgatgcctgccgtgttcagcctgtgggcaatcgcttcatccctgccgtgaacgccatcggggtattcgacaaggactctgttcaaatgtgttcttgtcgggtctgcgtttttaggtattatctttctctctatatggtcggactgcgtggtgtccgatgtaccctttgctttctttatgtccaatgaaaaatatcccatattattactgtttttgcggttatcgttatgtctcttctctctgcctgtggaatcggctcacggggtttatctcaaggatgaacccttgctgcactcggcataatccaaacgggtttggcttctgctctcgtttgcacagggtttccaaagggatttccctttggctcgatagggtgtttttagcgttacggagtaatgcgtgaagaaaacgccctattgagctatggtatttctgcctaaataccttggggaaagcgaacgtgcatattacagatgaaatccccctttctttttcagtggctgtatcatccgccttgcggattggagttgcttcttctcctttatcggctctgccgattgggacaagggcttaccgcacaggtagtcgttcaagtccttataatcacgatagtacagcgacttatcaagcagccgttccccgaacttctccttcagcttcttgcaggtgttccgtcctgccgtgtcgttgtcaaggaaacagccgattcgggtgtaggtctccaatatactttccgctttcgcaagattggaaacggagttcagtatgacatagtcctgtgtgtccaatcgtgggtattgcggattgtttcttactcggatggtaaggaatgagaggtaatccatgaacccctcgaacaggtaacacatacatcgttgtccgtcctgctgtcggatatgggtgatgtttttcggggcgacacatcccttgaagtatctgttgcgcacttcatatcctcctgccatgttcggaaagccgatggcaaaatagggtttgtcggcattcataaaccgaagctccctgcattctcttttggcaagtccgatgtttattcccctttcttgcagataggctataagagcaggagaggacaactcaccaacccttaatccctgataaggctgattggcggaatcctgtctgccaaaagagaacgatgcagggcggatgtatgctgtccgctcctctatgcgtttcagcagataggctacatcttccgaacggtagagttccgctgccaatgcgaggatgtttccgcctttgccgatgccgaagtcataccatttttcaaactcggtgtttaccttgaacgatgcgtccgtttcttcccgtagcggtgatttataccacaggttcttgtcttgttgctttacaggcgtatagcccagactttgcagatagtctgccagtttgatttgctttacatcttggattgtcatattacatacgattttgaagttgatgaaaatttgttgatttgatgaattgtcaatgtaatgtatttatatacagcctcgtaacctctcaacatcttctcaacaaaccactcgccaaaagagaaatcaacaaacgggtgtcggtggtctctcaacttctcttttggcttgttgagattttgttgagaatgtatatcgtttattgtcagtgtatttatacccatattcaacaattcaatagaaaaatgataatattacagggattcaagttgctcccttgtgacggtgtagaagcgtcccactctccttatcggctcataccgacactcccgattgcagttgaactggtaggtggtataagtcagtccgtttggcgcaggggtcagtttccaacattcctgcaacacttttcggacttggtgtttctccacctttacctgtgagtgtaccagcaaaagaagaatgtcgctgtaacagaaagagaatgtatccgtgccgacactgtccatgatgtcaaggacaagttcgtgcatctctatctccaatcggttgcggttgctgcggataatcttctgcaaggcttctgtatgcagcaatgtggggttgaaccacatccggctttccttatcggtggatagctgtctgtattgcaggaaatggagaaaggcgggtatctccgctttcagcttttgcaggaagtcggtgtcatcggactgcaagcggtctatcttgcgcacccaatagcgtgtttcccctgcatctatgattacgggcagatactcgttgttggagcacagcacgaatttggcgaagaatgcaatctcgtcacggtctttgcctttggcttccaccttgtaggataaggtagtgctgaggtttttcaaccgttcgctgtcctccctgcggttgagcaacacctcatctaccacgataagcaacttgccagcccagtcggaattgaactggctgcggaaatcctcgttggtgttgaaagtcacattgttctgaaaaagggctttcagaaagttcaggaaggtgcttttacccgtgttgcgttcttccgacaccaacagcaggataggcaacttctgaatcggttgcaggtagagcagttgcagatagtccatccccaactcgtattgttccccgaagatgtgatgcagcaatgaacggatagaggggaaatccccttgtcggagtacatggtctatcggttcgtagaggttaaggaatttgccgaccacggaacggtagccgatgtgttcgggtacagtgcagaagccgtcatacttgggaacactgccgatgtaatccttgccgtaatcctgtcgcagggtctcgttgttccatgcgatgcgtttcttcacataccctccgttcagtctcggttgctccacaatcttgtagagcgttgttccgacacggataaattcttcctttgccatgccgccatccgatggcggtctgtggctgtcttgttgttcgatagctgacataatcaaatggttttaagtttgaaaattaccagctgcaaaaatataatcaattatcggataggttgttatgcaaaacacagcagaatgatgacaaatagcccccgaaacaaaaactttcaatggtttggggcaggaaagggttgtgcaaacggaaaaactcctgaaaagcgaatgtcggattacgcttttcgggagaaaaaaccagagcgtctgtcgtgctgtcgtactgacttaatgaattactgacttaccgagtgaataatgtcaggcattcagctacgagaagtattcggatttggatatactgttggtattcagcgagaagaagatgcttgttttctcttttcgcaggtacagtctttcaagaacggcattgcgtaccctttccgctccgaatgtgccgatatggaaagcgagggcaactatcgcttcaaggttgtaaacctccatacagcaattatcggatacccgtatgtttcgccttgtcccatattcccttaaaactccgttcttacaaagagcctttaccccagcacggaatgtcggggcggttactccaaacaggtcgcaaagttcccattcgctcatggcggttgcgcctatatcggtcggcaaggtgatgttgccgttgccgtccgttgtgatgatgcttcgtttcatggctatgcttggttatggggttacacttccgaacgatgcgttcagcttgttgccgaacatcgtcaggtcattgtcaagtttctgtgtggttatcttcgcatagatttgagtcgtgacaatgttcgtgtgtcccaaaacacggctcacgctttcaatgggcatccccttgctaagagccagtgttccaaatgtatggcgggcgcaatggtaggagatttgcttctctattccgcattccgccattacctttttcagttgtttgcacatcgtccaatagttgattttcccgaaaaccagcttgtcttccgacagatacttgtaccgttcgattatctgcaagggaatatccagcagcttcacttggaacggaacatttgtcttgtgccgtttcgacaatatccatttctcaccgttcacctccactatttcgtccgttgtgagttctttcatatccacgaaagacaaggcggtgaagcaggcgaaaatgaacaggtctcgcaccaatgcgagggtggggttgtcaaactcgtgcgccatgattcttttgatttcgtcctctgtcagatattcccgttccttaacattcgggctgatatggaactgcgcaaacggatttctcggtatcagtccgttatagtgcgcacgcatgaccacgcctttcagccacatgcagttcagccagatggtggcgtttttcagtccccgttcagccgtaagataagccgcaaactccttgatgaagtcgggcgtaagttccagcatggacatgtccgtccgtctgtagaatgacttgataaaggctgcgacatagttccttgcccttaccatgaccttgtatgtgccgatgctgcggtctttgccgacacgtttcaggaagttggcgcaatccttgtcaaaagcctttatcagtgtctcatactcgcttcctaccccttgataggcattgcgcaccatttcagccgttacgtatgcctctcggtcggatatgcgctgataatgcttgatgatttgcgccttgatgttatccaaagccagattgatgttccgtgcttcggcactcttgcctttggctcggttgcctttcgcatcccaaagggttttcgggatggtctgcttgcaactgaactgcgccacagtaccgttgattgtcactcgtcccatgatgggaacaataccgtctttctccttgctgccgttcacgtagaacagcactttgaatgtacttcttgccatactcgtttttttgtttgcaaagttaaatatcaacgagttagaccttgatacgcaaatcggtgacaaacggtgcaatagcatctctcatatgttaaatcttactctttcacgggtaatgatttgcaaaccattcttcttcttaaatccgcttttctttgcgtttcccgatttttcggcttgtcatcatttgacatcgtaacaactctgatattaagtcgtttaacgtcatttctcccgttttccgaggttattccagagattttccataagcttagcggtctaaaataaaacaaaaaaagagaatctaatttctcagattctctttggagagcggaagacggggctcaaacccgcgaccctcagcttggaaggctaatgctctatcaactgagctacttccgcaatttttgtgggcaaagatggattcgaaccaccgaagtcgaaagacagcagatttacagtctgccccatttggccactctggtatttgcccttttttgcttttgaggaggtttgtttctcaattgcggtgcaaagatacaactatttatttaaactccaaacaaaatcgatcatttttattgcagtaattgcacattcatctcctttgttacccagtttgccaccggcacgatcctctgcttgctccattgtatttgtggtaattaatccgtaaataactggtatatcgccagttgcgtttaattcggtaattccttgggttgctcccatgcaaacataatcaaaatgtggggtatctcctttaattacgcaaccaattgcaataattgcatcaagatcgcaattttccatcatttggttggctccaaaagtaagttcgaaacttcccggtacagttttcaccagaatattttcgtcttttgctccatgtttttttaatgtatcgactgcgcctttcagtaaagcaccggtaatattgaaattccattcggatacgacgataccaaatttcattgcttctgcattcggaacggaattgaaatcatattcggataagttatggtaagctgttgccatagttaattaaaagttgagaattataaaatgaagatttgagagtatgagagatttaagaagaaaggcacggatttcacggattccacggttttaatagatagtccgcttaatccggtgtaatccgtgcctcgatttccttatataatagatggtatattattttttcatcaatttagcttgctcgatatatttgtcgatgtccatagcctgataagattggaaatatttatccttgatcttagtgtaagcgtttacagcatcgtcatatttttcctgttttaccaggatttcaccagcttgtatcaggaagatcgggcttaatgtgttgttgtcagctttgtctgctgccgacaataaagtagaagccgctttgtctaattggccaagttgtgcgtagcagttacctgcagcacccaaaattgccggagcaaccatttggtcttttccattgaagctgtccagcatcttcactgcttcttcatatttgccaagttgtgcgtagcaaataccagcataagcttttgccaaattggcagcttttgttccgctgtagtcatcagcaacttttaggaaacctgtataaccgatgctgtcaccgttcaaagcctgttcaaaagcatcctgttcaaagtattcctgtcctttgaaaagagctgcctgtgctttttcttcacgtggttcagcatagaggtttttgtacatgataaaacctgctacaataataatcacagcaacaacactgccaataattgcgtttttgtacttgataagaaatgcttccgattgtgtcagtgcatcttctacgttcagatgttcgttctgattcttttgttctgccattttatatgattctttttgttattattcacagtttgatatttcgactcgcaaaagtagtttttttatatctacaaacgaaatttagaagcatctttttttgttttacacccgaaaaccacgaaaatcttgctacttttgtgaacaaattaacgtgtacacaatgatactgaaacgaatatccatattaaactataagaatctggaagaggtagaactgggattctctgctaagctgaattgttttttcggactgaatggaatgggaaagacgaatttgctggatgcggtgtatttcttgtctttctgtaagagctccggaaacccgattgattctcaaaatattcgtcatgaacaagattttttcgtgattcagggcttttatgaagcggaggacggaactcctgaagagatttattgtgggatgaaacgtcgttcgaagaaacaatttaagcggaataagaaagaatatagccgtttttcggaccacatcggttttctgcctttggtgatggtttcacctgccgattccgaattgatagccgggggaagtgaggagcgtcgtcggtttatggatgtagtgatttcgcagtatgataaggaatatcttgaagcgctgatacggtataataaagcattggcgcagcgtaacacattgttgaagagtgagtttccggtggaggaggagctgtttcttgtatgggaggagatgatggcgcaagccggtgcaatcgtattccagaaacgtgaagcgtttatccgggagtttattcctattttccaatctttctattcctttatctcgcaggataaagaggtggtgggattatcttatgagtctcatgcgcgggatgcttctttgttggaagtgttgaagcaaagcagggagagggataagataatgggattctctttgcgtgggattcataaagatgagttgaatatgttgttgggtgaattcccgataaagaaagaaggttcgcagggacagaacaaaacgtatctggtagcattgaaactggcgcagtttgatttcttgaagcgtaccggccggactgttcctttattattattagatgatattttcgataagttggatgcttcccgtgtagagcaaatagtgaagctggtggctggagacaatttcgggcagatatttataacggacacgaaccggggacatctcgaccgtattttacataaggtaggcagcgattataaaatatttcgtgtagaagagggcacaattcaagaaacggaggctaataatgaagcgcaatgatgccgaacaaataggaaaactgattcaacagtttcttcgtcaggagagtttggaatctccgctgaacgaacaaagactgctggatgcctggcctcaaatcttgggaccggcggcggcttataccagcaatctttatattcgtaatcagacattatatgtgcatctgacttccgcagctcttcgtcaggaattgatgatggggcgtgaggtattggtgcgcacgctgaatcagagagtcggagctaccgtaattacaaatattatttttcgttgaagaaagatattctgtctataacctttatacctagcttccggaatgtttcggttgcacggttgtaataaaaagggttttccaaatattgattgttatgggcgtctacgccgatgatagcggtgcaaccttcatgggcggctattttccagaaatccggatgaggaatggtagtaataccatgaatatcattgtactcttcatatccgatattatattccaacggtaagtttaaccgtactgccgtccggcagatatgtctgctgactagcttacaatgacgatcgaactcggggtaagaacgcataaataaatccggatgggcaaggtaggcaaatagtccgctttccattccttcaataacactctcttcatagagttcgagcatgtctaccgaatctgtattccggccgaagtaggggaacttctcatctgtgtgaaaatggtgatttccaaagatgatatagtccagtttatattctttgatgattccttttaaccagtgtatgtattcaggaaagtattcacattccaatcctatttttatgctgatttgatttttatatttctcttgcagcgaacggatactttccacatatcccggtaactcttcgggaagcatccggatgtcggatatataatcagtgtgatatttccacggagtgtggtcagaaaagcctaattcttgatagccgcctttgatggcacttaaaacaaattcttcgtcactccctgtcgcatgatggcagcgggtggtgtgggtgtgataattcgtcttcattgattgttatgattatatccatgcggatgtcgaatgattccgccggaacttcttctactaattgaaatgggaaacagattcctgctttataggctgatggtatgcgtggcaggagacggtcataatatccttttccccgccccaaacggttacctttagcatcgaaagctactccgggaacgacgatgaactctatggctgcatagtctgtgaatatttctccggttggttctgctataccgtagatgccgctgattgacatgtcttccggcccggtgtatatccgtagttctaaatcatcgcctactactacagggagtagaatccgtttttcgctactccatttttgaataaaggcatgtgtatctacttcgtcattcagcgaatggtatagtaatacagtatttgccgccctgaaagccggatgggcttcaagggcggcaagtatattagctgattgcagttttcgcatagttgaatccgcgtgttgggccttcagtaatgctatatgcttgcgcagttctttttttctttccatcttttttatccttcgtcacttcttcttcaacggttaccggagctttggggaaagcttctcctttttcaagtatctcaatacctttaatgacagtagcatctgtcttgttgaagtattggagataggcttccagtccaagcatattgtagatgatgttgccaaagaggttcttttccaatagtttgtatgatttctgaatgaggatatttcttcttttcactcctttactgtcggcaaaacggacaaactgttccaccaaaccttgatgacgaagatagtttagtaattcttcctcagtttcgtattggcttaacttcttccggttattgtcggtgtattggaatgtgaactgaatagtcagtccccggttaataactgtcgatagataagaagtgactcccgttgtatcctgcggtacgaatatatccggcatgataccaccgccgccatacacagtacgtcccaagctggtattataacgttcgctctcattctgtttgatactatcacgtgagaaaaattctccatgttcgtaacgggtgtataaatccagctcgtagttacggtctttaccgctttcgtatgggcgttggatgcaacgtccggatggggtgtagtagcgggcgattgtcaggcggatagccgatccgtcactgaaatcgataggctgttgcacaagtcccttaccgaaagaacggcgtcctacaactgtaccccggtcgttatcttgaatagctccggtgaaaatttcactggcggaagcagatccttcgtcaatcaatacaacgagcggcattttctgacaactacccgtaccgttggcaaattcttctgcacgtggatatttacggccttgagtatatacgatcaacttaccttcaggcaagaattcatttaccatgcggatagcagcttccatatatcctccggtattaccgcgcaggtcaatgattagacctttgcattttttgtggttgagttgtgctaatgcattaagcaattccacatggctggtacgtccgaatttgctgactttcacataaccgatatcgtcgtttaccatgtaagcagcatctacggtattttgaggaatgtctccacgtgtgatgttgaagtgtaataagtccttttctcctgttcgtttgattcccaattttacctgtgagcctttcggacctttcaaggtgcgcatagcccgttcgttcgttactttcttgccgacaaacatgctatcatctacagtaacaatgcggtcgcccgccattaatcctatcttttcagaaggacctccctgaacaacagcattgacatgaatggtgtcattctgtatggtaaactggatgccaattccgctgaagctgccttccagttcagagttgacttcttcgagattttgggctgggatataagttgaatgcggatccagttcggctagaatttgcggcatggctttttctaccaaatcggccatgtttacggtgtcgacatattgatcgtctacaatgcgtaacaaagcgtttagcttattggaggaaccattaatgatacccaaacggttgccggcaaaatgcttggcataaaatgtaccgataagaatcccgactaccacactgactgctatgatgacaggtgtaaaacgtgaagagttttttgtactcatgtctattccttttttaaaacgttcgtcttcttatttatttggagaggaattatcatctaactctgtgtagataacttcgattcccgcccgttttaataactctattccatcttccaggcgataatgctcggaataaactacccgtttgattcctgcctgtatgattaactttgcacattcgatgcaaggagaggcggtgacgtacatggtagcaccgtcgctactgttatttgaacgcgctattttggtaatggcattggcttccgcatgcagaacgtatggttttgtcaggttgttttcatcttcacatacattctcgaatccggaaggtgttccattatatccgtcggagataatcattttatccttaacgattaaagctcctactttacggcgttgacaataggaattttcagcccatatactggccatacgtatataacgtttgtcaagttctaattgtttcttttcagtgtccatgttgtttactatttactgcttactacccggaaaaccatacggaaagtttgtttaccggatgccggtttgtataaaaggtataagttattactatctccttcgtaagatgtagctgcattaagcccctctataaaatttttggcgagtttgtcgtcgccataactacctgcagtggtaactgtagctttgaagctattgtttttggcgttggcattccattttccttcaaaagtactggttgcaattacagttccttttatatttccgttaataacatctccatctactgtgccatcaaatacaatattatatgtaccgtttttattaagctctttaatacttgctttctcttgttcttcattctcccaaaagccaaacatctcatgacctccatctactgtgatataatttagtttccaggtttttcctgtaaagatagcagctacatcgtccgaatcattacatcctgaaaataaaggaagcaataaaagcaatcctactagttgaaatatacttctcttcatatttaatatctaataacttaatacttatttctttatcccatttctgattagcaaagcatcaatgctcggttcctgtccgcggaaacgtttataaagtatcatcggatgttccgttcctcctttcgacagaatattattgcggaatgagtctgccacttcctgattgaatatccctttttgcttgaataatgaaaatgcgtcggcatccaatacttccgcccatttgtagctatagtatccggcggcatatccaccggcaaagatgtgggagaattgcgtactcatacaagcttcttgtactaccggcaatatttgcgcatccttccaggcttcttgttcataagctttcacatctccttcaaaaggagtgttgtgcgtataccatgccatatcaagtaaaccgaaacttatttgtcgtagacaagcatacgcaacattgaagtttgatgcatctacaaggcgttttatcaattcatccggcaatacttctcccgtctgataatggcgggcaaaggtattgaggaaatctttctctatggcgaaattttccataatttgcgagggaagctccacgaaatcccaatatacattggttccacttaaactcctgtaagtagaattggcaaacataccgtgcagactatgcccgaactcatgcaagaatgtttctacttcattgaaagtcaataaagcgggcttattctcggttggtttggtgaagttcatcacaacggatacatgagggcggctgtttttaccggtctttttatctatccattggtccttataactcgtcatccaggctccggcccgctttcccggacgcggatggaaatcggtgtataagacggctaaaaatttaccgtctttatcaaacacttcaaaggcttctacctctttatggtaaaccggaatttctgtatttttccggaaagtgattccatataacttttctgccaagccaaacacccctttcttcacttgttccagttcgaagtaagggcggagcatttcttcgttaatattgaattttttgtcctttagtttatttgaataataactccagtcccaaggcatgacaacgaaatcagctccctgttcttcgcgagccagttcttgtatctctttatattcttgttgtgcagtaggagtgtatgcttccagcagttggttgagcagcttgtataccgacttgctgttttcagccattcttttctttagcgtatattccgcataatctttgtatcccagtaactgggctattttcatgcgtgtattggctatcttttttacgatgtcgatattattgaattcgttatcgtgtgtacatttggtattataagccatatagagtttttgacgtaaatcccgattgtcagaatacgtcatgaaaggaatatagctcggagcgtgaagtgtgaatgcccatccttctttttcttcgttcttggccgtttctgcagctgcttctatgataatttcaggtagtccggcgaggctctcttttttcgttaacagcatttgataagcattcgtctctttcaggttgttttcactgaaggtaagcgtcaatttactcaattcggtagtcagacgacggtattcttctcgtgcttctccttctaaattggagccatgacgaataaaactgttatatgcattttccagtaactgtttttgttcctgtgttagttgcaaagtctctttttggttatacacttccttcacacgtgcgaatagctttttgttcagtgtgatattattgctgtgttcactaagcaacggcataatcttttgagcgagttcttgtagatcgtcattcgtttctgcgctcaacatattaccgaagacggcaactactttgtccagtaattcccctgactcttcgaaagcttctatcgtattggtaaaatcagccttttccggattctgtatgatggcctctatttcagcattttgtagcttgattccttcgaggatagcaggctcataatgttcagtttcaatccggtcaaacggcacggtttcgtgcggcgtatggtattgcccgtagaaaggattctgggcatttgttatattgttcatagtgcaaactagtatcaatgttattaataatctctccatagagttacaaagctactaaaattgtagcttattcaacggataacacgttgctttttaacaatatataaaatgaaatgtataaaaaaaccgctacggtttcccgcagcggtttctatattgttcaggcttctaattaagcgttaactgatgccatgtgagcgatcaagtcaagaactttgttagagtaaccgatttcgttgtcataccaagatacaactttaacgaaagtatcagtcaaagcgatacctgctttagcgtcgaagatagaagtacgagcgtcacccaggaagtcagaagaaactactgcatcttcagtgtaacccaggatacctttcaattcgccttcagaagcttctttcattgcagcgcaaatttcagcgtaagtagccggtttagccaagttaactgtcaagtcaactacagatacgtccaaagtcggaacacgcatagacataccagtcaatttgccgttcaatgcagggattactttacctacagccttagcagcaccagtagaagaagggatgatgttgccagaagcagcacgaccacctctccagtctttcatagaaggaccgtcaactgttttctgagtagcagttgtagagtgaactgtagtcatcaaaccgtcaaggataccgaacttgtcgttcaatactttagcgataggagccaaacagttagtagtacaagaagcgttagatacgaattgagtaccttttacatatgttttttcgtttacaccgcaaacgaacatcggagtgtcatctttagaaggagctgacattacaacatattttgcaccagcttcgatgtgagcctgagctttgtctttgctcaagaacaaacctgtagattcaacaacgtattctgcacctacttcattccatttcaagtcagccggatttctttcagctgtgatacggatagcttgaccgttaacgatcagtttgctgttttcaacatctgcttcgatagtaccgttgaactgtccgtgcatcgtgtcatacttcagcatgtaagccaagtaatcaaccgggcaaaggtcattgatacctacgatttgaatatcgtttctctccattgcagcgcggaaaacgaaacgtccgatacgtccgaatccattaatacctactttaatcattttgtttaaacttttaagggttttataatatttgttcaaatatctctcgacctgcgcacttgttttattttcaaatgcggtgcaaaattacaaaaatgtttttatattcgcatattaaattcacattaaatattgaaaaaagatgggaaagagcacatttttacaggactttaaggcgtttgctatgaaaggtaacgtcatagacatggctgtcggtgtagttattggtggtgcgtttggaaaaatcgtatcatcattggttgctaatgttattatgcctccgattggtttactggttggcggtgtgaactttacggatttgaaatgggtgatgaaagcggcagagatcggtgctgacggtaaggagatagctccggccgtgacattggattatggtcagtttctgcaagccacttttgattttctgattattgcttttgctatattcttatttatacggttgattacgaaactgacaactaaaaaacaggcagaagtgccagctactcctccggctcctcctgcaccaacgaaggaagaagtcttgttgacggagatacgcgatttgctgaaagaaaagaatagttgattctaattaaaataaaggagattccaagtataaacttgtgaatctcctttatttttctcttcattattaatatagattgcgtacttttttctacttttgcaactcaatttattcaaaatccaaccattgatatgcaggaaaaaataataattcttgatttcggttcgcagacaacacagcttataggccgtcgtgtacgtgaattggatacgtattgtgaaattgttccttataacaaatttcctaaagaagaccctactattaaaggagtcattctctccggaagtcctttctcggtttacgataaagatgctttcaaagtagatttgagtgaaattcgtggtaaatatccgatattgggtatttgttatggtgcacaatttatgtcatacaccaatggcgggaaagtggaaccagccggaacacgcgaatatggacgtgctcacttgacttctttctgcaaagataatgtgctatttaaaggtgtacgtgatggatcgcaggtatggatgagtcatggagatacgattactgctattcctgataatttcaagaaaatagcttcaacagataaagtagagattgctgcttatcaggtagaaggtgagcaagtgtggggtgttcaattccatccggaagtattccatagtgaagacggaactcaaatcctgaagaactttgtggtagatgtttgtggttgcaaacaagactggtcgccggcttctttcattgaaagtacggttgccgagctgaaagcgcagttgggggatgataaagtcgttctcggtttgagtggcggagttgattcttcagttgcagcagtgttgttaaacaaggctatcggtaagaacttgacttgtatctttgtagatcacggtatgctacgtaagaatgagttcaagaatgtgatgaaggattacgagtgtctcggtctgaatgtgattggtgttgatgccagcgcaaagttcttcgcagaactggctggtgtggctgaaccggaaagtaagcgtaagattataggtaagggcttcatcgatgtatttgatgtggaggctcacaagataaaagacgtgaaatggctggcgcagggtaccatttatccggattgtattgagtcattgtctattacgggtacagtgataaagagccatcataatgtaggcggtcttcctgaaaagatgaatctgaagttgtgtgaaccgcttcgtttgttatttaaggatgaggtgcgccgggtaggtcgtgagctgggtatgccggagcatctgattactcgtcatccgttcccgggaccgggattggcagtgcgtattttgggagatattactcctgaaaaagtacgtattctgcaggatgctgacgatatcttcatccagggattgcgtgactggggattgtatgataaagtatggcaggcaggagttatcttgttgccggtacagtctgtgggcgtaatgggagatgaacgtacttatgaaagagcggttgctttgcgtgctgtgacatctacagatgctatgacagccgactgggcacatttaccttatgaatttatgggtaaggtatcgaatgatattattaataaggtgaaaggagtgaaccgtgtaacctatgatatcagttccaagccgccagcaaccattgaatgggaataataacattatccatcataaaaatagcctcaacaggaatttccgttgaggctatttttatgatggatagtttttttttgattgctcagtccgtatctactcgcttaccagcttttgtgcgtccggaataagaatctctttccggcgtaactctaataatcctttgtcttgtagctcgttgagtgctttcgatgtattcaaccgggtatcatctaagtagcgggcaaggtcgtccatttttactttgaatatcttttctccctgcgccttttcacaatgtaacaggaaaaagcgaatgattttctctcttaaatcctgtgtcggctcttcccataaacgtgagtaaagattttgtgcccggttacttacgatgttcatatagttcagccggaatatttcatatttgaacaggtcgctaagtacgaatgctttgctgatactgacggtatgcgcttccgtatgtgccacataagcagaagtgtaatgggtattcatgccaaacaacgactgtggttccagcagataaggtgcttccatctgttcgatgacggtgtatatattttctttggaacttgtgacgatagaaacctctccttttaataggaagcagagttgtttacacggactaccactctctatgatagtttctcccactttatgcttgataaagtgtagcttgaccttatccagaatacttgtgaaatcttcatgacaaagaccttgaaataaaggcaattggagcaaagtgtcgaacattgtttccatatgttgtaatctcttgttaatcgtacaaatttactcataatacaatactgctgtcaacatctgaccgttctttttgttttttttattgtttgaatgcataaaaatagagtatatttgcagaaaaaaaggagggaattatgttcgcaggcttcaattggcagcagatgattagtgcgtttatcgtactttttgccgtgatagatattatcggctctatacctattataattaacctgaaagaaaaagggaaagatgtgaatgcaatgaaagctactgtcatctcttttgctttgctgatcggatttttctatgcgggagatatgatgctgaaactctttcatgtagatattgaatcgtttgcagtagccggtgcatttgtcattttccttatgtctttggagatgattctggatattgagattttcaagaaccagggtcctatcaaagaagcaactttggtgccgcttgtctttcctctgttggcaggtgccggagctttcaccactttgctttctcttcgggcagaatatgccagtgttaatatcattatagctttagtcttgaatatgatctgggtttactttgtagtgagtatgaccggtcgtgtagaacgtttcctgggaaaaggaggcatctatattattcgtaaattctttggtatcatcttattagctatttctgtgaggttgtttacagccaatataacgttattgattgaggcgttgcatcggtcttgattttcttattaaattgaaagctattgtatcggatgtgccatcgtgttggcacaactgtgacatgtctttgtcgcaatcgtgccactttgatgtcacaagtgtgccaatgtggtggcacgagttggcatttataacgtttcttcttcttctgctgctgctgttgtttcttcttctgtattttcttcctcttccatttcgtccgcaaaaggttccgggcgttgcggtccgtgatttacgaaaacgaaagcacagagtgttcccataattcctccgctaagatgtccttcccacgacatattggtgggggagaaataaggaaacatatgccatataatccctccatataaaaaggtgacaagtaaagagatggcaatgagtggaacatatttgcggagaataccactgaaaaagagaaagaaggcaagtccgtaaattaatccgctggcaccaatgtgccatcccggttttccaatcaggaaagtaagtagtccgcctccgaaccagattaggataaaaatcttacctgctatcccccggtaaaagtaaaaaagacaccatgacaagaaaaataaaggaattgtatttgtcagtaaatgactaaatccgctgtgtatcaatgggtgagttaaaatacctaccagcccccgtttctccataggatatacccccaagcgagagaagtcccagtccattccgacttccataatcttgagtatatagagaataaaaataagaaacaaaggctttgctgcagccagcatgatacgctgaatatcttgcttcatgacattcttttctttagatattttacgcaatactacgaatatttgcacaaaatctgaaaataaaaagcctttttatttttgtttttatctataatttgtacatttgggcgttatacccgttgtatatgatgctacagcctatatatgcggtatgtaacaataaatagatatatgatataatgaccaataaattaacctttaataatgcacaactatgagttatttacgatttgacaagaccctcatgacgaatctggaagagtctcttcaaagagaaatcctccggacgaacaaagcaggagcttatcattgtacgacgattgttgattgtaacacacgcaaatatcacggcctgttggtaattccagttcccaatatcgacgatgaaaatcatgtgctgctatcttctcttgatgaaacggtaattcaacacggtgcggagtttaacttgggattgcacaaatatcagggaaacaactttagtcctaacggacacaagtatatccgcgagtttgattgtgagcatatcccggcaacaacttaccgtgtcggaggtgttatcctccgcaaagaaaaaatctttgtacatcatgaaaatagaatcctgattcgttatactttgctggatgcgcattcggctacgactttgcgcttccgcccgttccttgctttcaggagtgtacgtgagtacacacatgaaaatgcgcaggcaaaccgcgagtatcaacttgtggaaaatggtattaaaacctgtatgtatcccggatatccggaactatatatgcagttgaataaaaagtgtgagtttcatttcatgcctgactggtatcggggtattgaatacccgaaagaacaagagcgtgggtatgacttcaatgaagacctttatgttcccggttattttgaggtggatataaagaagggggagagcatcgtattctctgccggaacttcagaagtgactccccgtagattgaaacaaacatttgaggctgaagtgcttgatcgtacccctcgtgatagcttttaccattgtctgaagaattccgctcatcagttccataaccagcaggaagacgaacattatattcttgccggttatccgtggtttaaatgtcgtgcacgtgatatgttcattgccctgccgggactgacgcttgcgctcgatgaggtcgatcagtttgaggatgtgatgaaaacggcggaaaaggcaattcgcaattttataaatgaagaaccagtaggctacaagatttatgaaatggagcatcctgacgttttgctttgggctgtctgggctttgcagcaatatgcaaaagaaacttcccgtgagcaatgtcgtcagaaatacggagaacttctgaaagatataatggagtttattcgtcagcggaaacatgagaatcttttcttgcatgataatggattactttttgccaacggtacggataaggcgattacatggatgaattctacagtgaacggacatccggtgattcctcgtacggggtatattgttgaatttaatgcgttgtggtataatgcgttgcgttttatagctgatttggtgcgcgaaggaggagacgtatacttggcggatgaacttgatgcgcaggcagaagtaaccggaaagtcttttgtcgaggtattccgtaacgaatatggttatctgcttgattatgtagacggtaatatgatggattggagtgtacgtcctaacatgatatttaccgtagcgtttgattattctcctttggatcgtgcacaaaagaaacaggtgcttgatattgtgaccaaagagctgctcactccgaaaggaattcgttcgttgagtccgaagagtggcggatataatccgaactatgtaggtccgcagatacaacgtgattatgcttatcatcagggaacggcttggccttggttgatgggattctatctggaagcttatcttcgaatttataagatgagcggattgtcattcgttgaacgccaactgattagttatgatgacgaaatgacaagccactgtgttggttccattcccgagctattcgatgggaacccgcctttcaaaggacgcggcgcagtatcgtttgcgatgaatgtagcagaaatactgcgtgtcttaaagctactgtctaagtattattaaaaaaggaggaacgaagatgaaagttttaatgtttggatgggaattccctcccaaaatatatggtggtcttgcggttgcttcttatggaataactaaaggattgagtctgcaaggtgatatggagacgattttctgtatgcctaaaccgagcggtgaagaagaaaagttcttgaaaataatcggtatgaatcaagtacccatcgtgtggcgtgatgtcaactacgactacttgaaatcccgtttgttggaaatgacaccggaagaatattactctttccgcgatcatatttatgccgatttttcttatatgcatgtgaatgatttggggtgtatggagtttgctggtggttatcccgggaacttgcacgaagaaattaataatttctcgatcattgccggagtagtagcccgtcagcaggagtttgatatcattcatgcgcatgactggctgacttaccctgccggagtacatgccaaaatggttagcggaaagccgctttgcatccatgtgcatgctacggattttgaccgttctcgtggcaaagtcaatcctactgtttattcgattgagaagaatggtatggatcatgccgattgtatcatgtgcgtatccgagcttactcgtcgcactgttattaacgagtatcatcaggaccccagaaaggtatttgccatgcataatgctgtttatccattgtcgcaggaactgctggatattccacgtcccgatcactcaaaagaaaaggtggtcactttccttggacgtattacgatgcagaaaggaccggaatattttgtagaagctgctgcgcttgtattgcagcgtactcgtaatattcgttttgtaatggcggggtcaggcgatatgttgaatgccatgattaacttggttgctgaacgtggtattgccgatcgattccacttcccgggcttcatgaaaggcagacaggtatatgaggtttataagaacagtgatgtatttgtcatgccgtctgtctctgaacctttcggtatcgctccgctggaagccatgcagtgtggaacaccttccatcatttctaaacagtctgggtgtggcgagattcttgataaggtgataaaaactgactattgggatattcatgcaatggctgacgctatccattctctgtgtaccaatccgtctcttttcgaatatctcaaagaagagggaaagaaggaagtagatgggattacgtgggaaaaagttggcttgagaatccgtgctctctacgagtctgtgttaagaaactatggtaaataacaaaacaataaataaaatgagaactatctgtctttattttgaaatacatcaaattatccatttgaaacgttatcgtttcttcgatattggtaatgaccattattattatgatgattatgccaacgaaacgggtatgaatgaggtcgctgaacgttcgtatattcctgctctcaatgcgttgatcgagatggcgaaaaactcgggtggtgcttttaaagtagcactttctatctcgggagtagccttggaacaattggaaattcatgctccggcagtcattgatttattgcatcagttaaatgaaactggttgttgtgagttcttatgtgaaccttattcgcatggtttgtcttcactggctaacgaggattgcttccgtgaagaagtacttcgtcaacgtgataagatgaaacagatgtttggcaaagaaccgaaagtgttccgcaactctagtctgatttattctgatgaaattggtggattggtagcttctatgggcttcaaggggatgttgacggaaggtgctaaacatgtgttggggtggaagagtccgcattatgtttatcactgtaatcaagctccaagtcttaagctcttgttgcgggatttcaaactctctgacgacatcagtttgcgcttttctaattcggagtgggcggaatatccgttgtttgctgataagtatattaattggatcgatgcattgccacaagaagaacaggtcatcaatatcttcatggaattgagtgcacttggtatggctcaaccgttatcttctaatattcttgaattcatgaaggcactgcctgaatgtgcaaaagctaaaggaatcacattctctacaccgacggaaatcgtgacgaagttgaaatctgtatcacagcttgatgttgcctatccgatgtcatgggtggatgaagaaagagatactagttgttggttgggtaatgtcatgcaacgcgaggcttttaataaactgtatagtgtagccgaacgtgttcatttatgtgatgaccgtcgtatcaaacaggattgggattatttgcaggctagcaataacttccgttttatgacaactaaaaacaatggtatgtggttgaaccgtggtatctatgattctccttatgatgctttcaccaactatatgaatattttgggtgactttatcaaacgggtagatgcactatatcctatcgatgtagacagtgaagaattaaattctttgttaactaccattaagaatcagggagatgaaattactgaattggagaaggtattggctaaattacaggcaaaagtagaagcggcaaagaaaacggcagcaaaaaaagctacaactgctaaagaatcggtagtgaaagaggaccctgctgctaaatcaaaacctgttgcgaagaaaactgcagttaagaaagcaacagcagaaccgaagaaggctacggggaaagctaagaaggttacagttaaataagatgtataagaattattatatatggaaccgtgggtgagataaaaggcactcacggttttttatgatagagattttaagggatttcaatgaatgtctttttttgtataatacaaagggtgaaatttaccttggctgctttcatctgaatatatatctataaaataatgaggttgtgtcaaaacgttggcacaacctcttttatattttacagttctgctatattttcttttggctatgctgctttttcctcatgcatttggcaacaagttgctatattccaattatatcgggttataaatagtcccataaacatatatttggcaactgtaatgagcccctttccttcttttatcagtttagcacacatttttttgatattaaaggctatagcaaagaaagcaaagtccattgtaaccttgtcttctcccacatgccggaatcttctgtatgccatgttgtatttcatttgtccaaacacagcctctggttctatacacctcctgcctctatgcttgataccttcttctgagagcaacctttcccgtgcctgccgtttgtattgatttaatcggtggttgacttctataatacggttcccccgagctttaaaacaactgccacgcaaagggcaaccttcgcatctttttgctttataccgggcactttcgatgatgtatccgctcgctgtcttgtcacgtttggttcctatacggttcatgtgctgtcccataggacaaacgtaataatcctcttgggcattgtaatggagactttcggcatggaatgggttgggagtataacgaggacgctgttctttatggaagtaattgtacttgatgaaggcttctatcccattctcctgcatgaaccggtaattttcttccgaaccgtaaccggagtctgccacacagatattcggtaaacggttatagcggtactggaaagagtggaaaaaaggtatgagggtcagtgtatcggtagggttgggaaacagacggaagtctgtgatgaattggttttcagtacctatttgcagattatatccgggtttggtctgcccgttcttcatggcatcttctttcatgcgcatgaatgtggcaccaggatcggtcttggaataggagttacgttctccaagggtatcaaggtgattgtcgtattctatcagcttgtcacgatacccttcaagttccatgacctgcttcttctttttgcgcagggctttcttttcttccttatcctttgttgcaggctggcgttccagggcttctttaagttcatccactatgtcagagagcctgcagggagtaaactccacggatgtgtcttttatagagttctcctgtgcaatggcttcatccacctgttccaagagaatacggattttatccattagtctcgtacggttccgttcgactgtcttgcgccagacaaaagtatatttgttggctttggattcaatcttggtgccgtcgatatactccacatcaaggctgatgaaacctttatcggcaaggacaagaaccaactgggtaaatacattatttatttcctcctttacacggttacgaaaacggttgatcgtgataaaatccggatgctcattaccggcaagccaaatataatgaatgtcacgaaggaggtgcttctctattttacggcaagaatagatattattcatgtaggcgtagattatcaccttaagcatcattttaggatgataaggacaacggcccgtttccttataaagcttcttgaaactctcaagattgagattgtcaataacagcattcacgatgcggaccgggtcggtcgcagctatgttttcatcaattctttgtggaaaaagaacggtttggttgggaatgtaaggacgaaaatgtaactttgccataacgaaaaactttatacctaaagatacgaaaactttgggtaataacaaagcccgggcttgagaaagtctgggctttgcgcataaaaaaggctgtgtcagcgttttgacacaacctcattattttatagattatcttacttgtcttttatttcgattttgttccgaagtttgtagagacaacttcaagtttgagtaaatactctggatataaagggttgccttgagcatcttgtatgcttcctttgctaccccctttcaaacgtgcatagccaggtttcaggtcatgttgtatgctaataacattgctcgaagaaccataatagctattacttgaggaagcatctgtggttacaagtactggaataagtatgaatttgttccaatcactatatttttcccattcttcaatattatgaacctctttagattctgttttgccttcggagttagttatttggagagttatcgtaccattcttgagtttcttttctgcttcttctctttctccatcctctaaacaattatttatcatttgagtgatattgttgaatgtatattgggtaaagttagttgtagtaggattaaatagagatgaagttataccatcgctaagttgattacctttgaagaaactatctttatattttttacgtattaataaaacgttattaggagtagacatgccaaacttcttatcactggtttcattatagataggaatccctaattttaccgcattcaaagtatctccttgaagcttttctgctatttgactaacagggagagttaactgagtaaagattccagctggactttttaaataagtccattcagatttattgatgcaattttgaatagctactttatcattctctaactggtttgcttgaataacttcacgagtggtagcaaaggtacgatatccatagtaagtagagtctttatactctccattttcttctgctactttcttttgcaatttaagaccagtaattgtatcgacagcatagcatttatacactacgttcatttgagcttgatttatgtaaagtaccgtaccatcaccgtaatcacttttcacataaattcccttaaaaatcttcctaaactctttattgtcaagattgacacctaactcattggctttttttataatctctttaccaatttccttggcagcttcgtctctgaaagaaacatgaacactagggacatacgtactaagattacgaatagagtcttttactgaaagatcgactgctgtataagctttcgtgcctaataagctattaggatctgcgtgatcgtagtagttttccggattaatatttgtatagtaggcatgttcagtatctaagttctcgctcaattcatagacactcaaacgacaagctgttaatgaatctccaaagtaactgctataccataaataaagttcgatagtgtggatgttaccaatgattttattgttgtcatcacgtatgaatgtgacatctttattatcttcattatcatcccctaccattacgcgggtagctttcttctcttcgtccaaagcagtaccatcatatactccagggaatgtcattcctgacggacagttgagttctgccaagaagcctgcctgataagttccaaatatttcatcagtgaacttacctacataccctatattagtcattgcataaatctcaccggcatgaacggattcggtagttacatcaaatgtagatagctttccattgatattttggtcgcttcccggaaacattcccaatcccagtccggcagtgttgtcatcacaaccccaaaaggtgattgccagtaaaactattaaggcgtattttgttttcatgatcgtcgtatcttgattttttttattcttcttcgtttgcagtcgcatcccatacctgatcgtagaactcgttgcaggcatctgcatagttttccgggttctggtagtcaagcaccagtttgccagattggcgggcgtattcaataatagactcgtctactttttcgctgttttgtatgactccatccgaataatcaacggcgagtttgcacagagcagcatagtctaccggctctttcaaatcacctaaatcttttttggaaatacctttcagcatcaatttggctgcgaaatcgtcgctaagtgtactcttgaaatcatcttcataaacagagaataccactttagcgtcgcgaaaagaaggttcgtctttataggctttcttaatataaagaggagctaaagctgtcatccagccatgacagtgaatgacatcaggacaccagcgaagttttttcactgtttccaatacaccgcgtgcatagaaaacggcacggctatcgttatcatcatattctataccattttcatccgttgtctgcatacgattctggaaataatcatcgttatcgatgaaatatacctgcatacgtgcggattggatagaagcaacttttataatcaaggggtggtcagtatcgtcgataatcaggttcataccagagaggcggatcacttcgtgcagttgatttctgcgctcattgatatttccccatttaggcataaaggttctgatttcacggcctttttcttgtatcgcctgtggaaggtttctacctatattggccatttcggattctgaaacgtaaggtgtaatctcttgagtaataaataaaactttattcgcctttgtcataataacaatagttcactataatattctgcaaagatacgaaaaaaaagacacattaaataagatattctttctttatgtggcaaatattagtttattttgcagagtttttgcaaacgagtaaaacataaaccaattgacgaaaatgaaagtagtgcacactatcaaggacttacaggcagaattgactgccctaagagcccaaggtaaaaaggtgggactggttcctacaatgggtgctttacatgcgggacatgcatctctggtaaagcgcagcgtaagtgagaatggtgtaactgttgtgagtgtttttgtgaatcccacacagtttaacgataaaaatgacttggagaaatatccgcgtacattggatgcagattgccgtttgttggaagaatgcggggcggatttcgctttttctccttcagttagcgaaatgtatccggaaccggatacccgtcaatttagctatgcaccattggatacggtgatggaaggagctttccgtccgggacattttaacggtgtttgccaaattgtcagcaagctgtttgatgctgtacagccggatcgtgcatatttcggagagaaagacttccagcagttagcgattattcgtgagatggttcgacaattgaaatataaccttgaaattgtaggttgttcaattgtacgtgaggaagatggactggcattgagtagccggaacaaacgtttatctgcagaagaacgtgaaaatgctttaaatatttctcgcaccttatttaaaagtcgtaactttgcagccactcatacagtgagcgagacgcaaaagatggttgaagatgcgattgaagccgctccgggtttgcgtatggagtattttgagatcgtagacggaaacacattgcagaaaattagcaattgggaagatacttcctacgcagtaggatgcatcacagtgttctgtggagaggtccggctgatcgataacattaaatataaagaataactaaaaagacgaaaccttatgatgattgaagtgttgaagtcgaaaattcattgtgcacgtgtcacggaggcaaatctgaactacatgggtagtatcacgattgatgaagacctgttggatgctgcaaacatgattccgggagagaaagtgtatatcgctgataataacaacggtgaacgctttgaaacctacattatcaaaggtgaacgcggttcgggcaaaatttgtctgaatggtgctgctgcccgcaaggtgcaacccgatgatattgtgataatcatgtcctatgcattgatggattttgaggaagccaagtcgtttaaaccggctgtaattttccctgatcctgctacgaataaagtggtaaagtagaaagtatctttagatatttgaaatgagaaaagccccgtttacagttcgtaaacggggcttttcttattctacttttttatgccgggggtgatcgatgttctacccacgtgtgagttggttttagcccgggtgttaataagcggcagttagttgccggcgtttgttttcagttgctcattcatagcagcggcagctttacggccatcacccatcgccagaattacggtagctccaccgcgaacgatgtcaccacctgcgtaaatcattgggatagaagattccatgttgtcatttactgcgatagttccttttcgtcctaattccagtcctttgatagagcttggaacaatcgggttgggagataccccaacgctgacaatggccaggtctatatcgattgtttctgtcgctcccgggatggctacaggactacgacgtccggaagcatccggttcgcctaattccatcttttgcagaataacttgttttacgcaaccttgttcatcagcaatatattcgataggattatgcagagtgaggaattcaactccttcttctttggcgtgttttacttcttcgatacgtgcaggcatttcttcttccgagcgacgatagataataatagcacgttcagcgccaagacgttttgctgtacggacagagtccatagctgtgttaccaccaccgattactgccacattcttaccgaatgctaccggagtgtctgaatcttcgctggcggcatccatcaaattgacacgggtgaggtattcatttgaagacatgatattgatagagttttctcccgggatattcataaagtttggcagtccggcaccggaagccacgaatattcctttgaaaccttccgctttcaagtcttctacaccgatagtttttcctacaatacagtctttgatgaagttaacgcccatcttaccgagattgtcgatttctacgtctacaatcttgtttggcaaacggaattcggggataccgtatttcaatacaccgccaatttcatgcagcgcttcaaatacagttacatcatatccatatttagccatatctccggcaaatgccaatcctgcaggtcctgaaccgataacagctattttgatgccgtttttctctgcaatgacaggtacggagatttgtccgctttcacgttcgtaatcagctgcaaaacgttccaaataaccgatagctaccggcttttcattcattttcagatgaatacattttgattcgcactgtttttcttgcggacacacacgaccgcaaactgcagggagcgcacttgtttctttcaatgttttagcagcttcgaggaactcaccgcgttcgatattcttaatgaagcggggaatatcaatacctaccggacagccttccatacatccaggattagcacagtcgagacagcgtttggcttctgtaacagcctgttctgctgttaatccttgattaacttcctctttacggctgtgtgaacggtattcagcatcgagttcattcatctctacacgaggaatagccgtacgttcttttggcttcatggatttgcgtaactcctgtctccaagtagcattacgacttttttcatcgatttctttggttgcttcacattccgattccagcttatgcatttcttcgcgttcgatattcttgaacgcacccatacgtttcagcatttcgtcgaaattcacttggtgaccgtcgaattccggaccatctacacaaacgaatttagtctttcctcctacagtgatacggcaagcaccgcacatacctgttccgtccaccatgatagtatttagcgaaacatctgtcggaatttcatattttttagtcagcaagcaaacgaatttcatcatgatggcagggccaatagcgaaacatttgtctactttctcacgtttgataacttcttctacacctgctgtcaccagacctttacggccgtaagaaccgtcatccgtcatgataattacttcgtcagagctttcacgcatttctttttccaggatgatgagatctttattgcgtccagccaatacagtgataacacggttaccggcagccttcaaagcctgtacgataggaagcatcggagccacacctacaccaccaccagcgcagattactgttccgaatttttctatatgggtagcttgtccgagtgggcctactacgtcagtgatagattcgccttcattcagctcgcagagacgggtagaagaaagcccgacttcctgcactaccagagtaatggtaccctttttcaggtcggaacctgcgatagtcaatggcatacgttctcctttttcgcctacacgtacgatgacgaagtgtccggccttacgagatttagcaattaaaggagcttcaatttcaaatttgaatactttttcagaaaagcgttccttgctaatgattttgttcattatctaattaatttgttgtttttattacgtaactgctatcagaatgatataaattttggcaaagatacagcttatttgcgaaatataaaagaaaagccactcttttgatgagtggctctctatataagggtgcttttattagtctgtcagatcaagtcttagtctatcttgtcgaagccgcagtacggaaccaacgctttcggaattctaatgccttccggagtctggttgttttcgagtagggcagcaacgatacgtggcagtgctaatgctgaaccgtttagtgtgtggcagagttcggttttcttttctgcattacggtaacggcatttcagacgattggcctgataggtatcgaaattggatacggaacttacttccaaccagcgtttctgtgcctctgaatatacttcgaagtcgaaacaaagggcagcagtgaaactcatatcaccaccacagaggcggaggatacgatatggaagttccagtttttgcaacagaccttctacgtggtctagcatttcctgatgagattgtttggagtgttccggtttgtcaatgcgaaccaattctactttggagaattcgtgcagacgattcagtccgcgcacatctttaccataggaaccagcttcacgacggaaacattgtgtataggcgcaattcattattggcaactgtttttcttccaaaattacatcacggtagatgttggttacaggtacttctgctgttggaatcagatataaatcatctacttcacaatgatacatttgtccttctttgtcaggaagctgtcctgtgccatagccggaagcagcgttaactactgtcggtggcatgatttcagtatatccggatttgcgtgcttcgtccaggaagaagttgataagagcgcgttgaagttgtgcgcctttacctttatatacagggaaacctgcacctgtgatttttacacccagatcgaagtctattaaatcatatttcttagccagttcccagtgggggagtgcatctttaggaagttcagtttccatacctcccattttttccactacgttatcttcagcgcctacaccttcgggtacgctgtcgtaaggaatgttggggatggtgtaaagtacattctgcatatctgttgcagcctgtgtcatagcggcgtctaattctttgttaccttcttttagttcggcaacgcgtgcgcgtgcagtctcagcttcctctttcttgccttctttcatcagttgaccgatggtgcgtgaaagcgagttaacctctgccagattcttatctaattcattttgtgtgctacgtctcttgtcgttaagagcgatcacttgatcgatcgtttcctttgcatttttgaaatgcttcttttccagtccgcggagtaccgcctctgtgttttctgtaatttgtttaatggtaagcatatctatactttttatgaactttcttatttaaggctacaaagataaagaaaaaacgaataatcaagcaaatatatgtgttatatataatatatatgatgtgtctatgatatatataatacatgtattgagctgtataataaacatatatgcagtgaatgatacatacatgtctcttttagagtgatatataaaactctggttgttaaaaagaaaggagatgtaatccaatggattacatctccttctcttaaatattttcagttgtgcaattatgcctcagtagcaggaacaacagaaacatatcttctgtcttctttgccaactttgaagctaactgtaccatctactaaagcgaaaagagtgtggtctttacccattccgatgttttcacccgggtggaattcagtacctctttgacgaacgatgatgttacctgctttgcaagcttcgccaccaaatatcttaacgcctaatcttttactttgtgattcgcggccgttcttagaactaccgacacctttcttatgtgccatttcttcttactttttaattgattaagctactacttctgtaattgttaattcagtgaactgttgacggtggccgttcagttttctgtgtccttttcttcttttcttgtggaaaacaagaactttgtcgcctttaaccaagtttgaaacaacctggcaaacaactttagcgccttctacggtaggagcacctactgttacgtttccgtctttgtctaccaaaagaactttttcaaattctactgttgaaccgttttctgcaccttcgatgtggtgaacgaacaacttttgaccagcttctgctttaaattgctgaccgttaatctctacaattgcgtacatcttatatataaatgtataagttagctccggcgggtggtctttaatcacttaaagaactctttatcgaacccgttgcggaataatcgggcacaaaagtactatttttattcgttcccgacaaatatttcttttattttttataggagataaaatgattacggcaaataaatgagcattttagctctcattgtagcctattggactaattctcctaaattctgcataatgattttgtgtggataaacacgaagttcctctcccgttgtcattccgttcagcacacctgcaaaatcgactcctgcattctgcgctgtttcggcatctacggtgctatctccaatatacaatgtctcttcggggctacttcccagatgttccaatgcaaatttaactccttccggcgaaggtttcggtgcttttacatcttctcctcccactactatatcaagaaaatctttaggcagaaattcttccagataactcaatatccggaaacgatacttggtagagataattccgacgcgggcaccccgtttcttcaattctttcagtgtagacaatgtgtcgggaaaaagacgggtatttacattcatgtgtacatcagcttccagtctgtactcctgccggaaggcctccagctgtgccgggttggtaattccggtaaggatactgaatgattcttccaatgttttgccgattgtacgcttgatagcttcatcagtaacggttaaatactgatgccgggtaagcacaattctgaaacacttaacgataccacgcgacgaatcggctagtgtgtagtcgaaatcgaataaataggttttgtagttcattggggaaaacttttccgcaaaagtactaaatacttttcttatttcacagcttctaccgtgtatccttgtctttttagtaagtttaataatcctttttctccggggaggtgcagggcgcctactgcaacaaaagtcggggcagccttcatgattgccggtagtttttcagcccatgctttattacggttgtaaattaggacatcttcttcgccgggaagtgcgtcacattgatcgcctttacgttcttcactgattttaagcatggtgttcagatcttggttcatgtaggcgtttgtgagccttttcaggttttctacttcagtctctatatggttaagagtgcacattaatagttgtgcttgccgttgtagtgaactgccattgaaaagcagattgaattggaattctgcagtttccagtccgtccaccttttttccgttttggatggcttggctttgaaagaatgtgtcgagttgctcttgcgggttgaatttccctatatgttttacgtaagccatcaccactacattatttaataagaaggcaggttttagcttcggagccatatttaaatctaccatcaggttttctttgcagaatttattagcagtctcaaagtctttcggagaaaggagagagtttagcgtggtatcactttcaatcatcattgccttttgcatcttttccatggtggcaggcgattgcatttccgacattttcatctctccatatacttgttgagtttcattcatagcctttttaagtccggcaatgctatccatgatgctgaacggtgctagatggtgagtgcctatgatgtaggaaggttggttcagtccgttgccggacactttccataaaagctgtgcattggcgctgaatgccacgcaaataaatagaactgctccgatgaatgatttcataattttatatcattagaagttgataattaacgtatcctgccgccgcttatccagtgtttggtataatagttctcgttcaagttgctgacgatcactcctttactggtgctggaatgaataaacttaccgtttttgaggtaaatgcctacatgagctactttattttttgaacgactgctggtgaagaataccaagtctccttcccggagattccgtttggcgactttattactttctttttttagatcttccgtgttacgcggcacttgggtgcggtataccttacggtacacttgataaactaatcccgaacagtcggctcctcgtttcgaatcacctccaccacgatagggaacccctatccagtcggctgcttccagatagagcttatggttatcctccatattaatatctacccccaacaatatagaagctcgcgccaatgcttgataatccagccggggtgcggaagtgcggcaggaactaaggctggcaaccagtcctaataaaaggatgaattgcaggaagtatcttttctttctattaggtttctttatactagacttatgggtatcagacttttctgttatatatctcatcataattattttatcattccctatttaccgtttactcttcttctacattaaaataatcctccagttctttctctgcggagttgtcctcgttgataatatcccggatgatgacaccgtgttccaataaagcaatcctcggacatacatctacggtatgattgagattgtgactggatatgataaccgtagcttgatgctcctcattatatttcttgagcagatgtttgatgatagactgagaacttggatcgagaaagttgaatggttcgtccagtatcagtaattgcgggtaatgaagcatggcagaaataattccgatcttttgcttgttacctgcggagtagttacggattagcttcttgtgcccgatcacttctccactcataaaacgttcgaaaggaatcagacgttcgtccacttcttctttctttagtccgtacatctttccgatgaaatagaaatattcttccggagtgagataatcaatcagaaaaccattgtcaatgaaagcaccggtaatgcttttccagtcttcgctttggctgacatcaatatcattaataatcaccttaccatcgtctgcttttaacagatccagcatgattcggaagagagttgttttaccggcaccgttgtttcccaccaatccgagcatatcgccttgattgatttcgtagtgttctatgtctacggcaatcttctcaccgaaattctttttaagtttgtcaatgataatcatgatcttcaatgtttatatggttaatgattcatgagcgtttattggcggctgtctctgaagccttccatgttttcgtatcgccgtttcatgaaacgatgatatacatttttaatccataaaggagaagtcagggtaaatccgagaccgacaactaacagaataatgtaagtgattgtttcacctaaaaatgcatttaatagactgtataagatgagaggcacaccgaaagcagcgaaattaaccaccatctgtatagcgctattcgtttgtcggcttgccactttctcgtttaaggggaccgtctgtttgttgtagacagccagttggaaaaaacagaaataaataaagccgatggtatagaaaaaccaggcgaaggcgcccagtaaagtgagtttattcatgatgatggcgggaatcatgagtatgaaaggtatgatttcgccaatgctgtatgtgtaatatttggctttcagtagactcataattgattctttacgagacatcaggccatcaatgtaattaccttcgaatgacataatctgtgaaaggataatcattccgaatacggcaaagttgtatacacagatgaaagaagtcatgaaattcccgtcgtagacactggaaaagctaagtgcgacggagaaagccaccactacaattgcgatattgcgtaatgcacctttgcagcggcggttgcgtaaaagcattttcagttccagcctcatatattcgccaacttccccgtagcgttcgaagaatttatattcggagacatgtttaatctgactatcttctacttttgccagctctgcatagataagtccggacatgatcttgcggttaatcaaccataaaatggcaatcacaagtatggtgccgagaaaatagagaatgttgccctgtatgtatccgtctcccagatccatgaagaaatagaagagaggactatcttcgggaataaaaagaaggcaacctattccaccgtagaaagcaataggtaatagaatccaccaaatacgttcgttgataagagtgcggcaaagcaagtaccagtaattattggcaataatcaatagcaagataccgataagataggtgatgacaccggggataccgaaaaacttggtaatagtgatgaaggaaaaagggacaaacagaaacaaccagaacaggttgaacaggcttagtcccgagcggattagtaaaaagtcgatgacacgaattcgtttaaccggcagcaggaggtaaggttttacctcctgcgtcggtgttttttgaaacggaacacgcaacagaaagtccagtgccaggataaagatcagaaccactgcgttcatcacatgatatggttcccggttgggaaccatatcagaaaatccgaacgcgaacgtcgtaccgaagaatatcaggtaaccagcccagaatgcgcccatgacataaccgagtattttagcaactttgttcttttcatacatcggatgccgtttggcggcaagccttccatgtttgcgtaattcgttgaatatcatcattcggtagatatactagagaatttttatttgttttcttccggcacggtcatgatgacttgaatttcgttgttctgtttcagcaatttggcgaggaagtcttgcacttctttcgctgtaatgctgttgaccaacttttcatagtcttttgtattatctacacccgtgtagaggtattcgtccatattattaagccagtagccgttttctttctgggcgtctttatacttcttcagcatatattctttgatcttctgcatgtgttcggcagacggaccttcttttgccattttgtgaagttgttctacaacaacagcagacaatttatctttcttggcagggtcagtttggaatacaatctgaagaacaagttcctctttcgggtatttaccaagacttccgttacagcttacaccgtatgtacctccttctttttcacggatttcagcagtgtaaaccaaatccagagcctgatctaagaagctaagcaggacattgttgcgcaagtcatatttgcaagtgccgctataaaggaacatgatggtagccatcggagtttcctgtgctttcgcaaatacatttttgatctctcccttgcggatgtccatcttgttatctttgaaagtctctttacggttgatagatggcagacctcccagatatttggcgattaacggtttcattgtagccaagtctacgtttcctaccaggaagaaagtgaaatcacttgcatctttgtagcggtctttgtacatttcaagaatacggtcatagttgatctggtctaccatgttttctttcattctgatagcgcgtggatggtgaccgtatagtacgcttgtaatagtgtcactgaaagcagtcatcgggttagcgtctgcattttgaagttcagctttcaaacggttcttgtaagattcgaatgcttcgttatccttacgcggagatgtgaaagtcagataagtaagctgcatcattgtctcaaagtctttcggagcacagctaccggaaacagtttccgtagtgttgccgatacccgcacctacgtttgcacgtttgccagccaaagctttacccagatctactttgctgaaattaccgattccacctactagagctactccgtttaattgagagatattgataatttcttcgttcgggaatacgctggtaccaccgaagcttacacctttcattacaatctggtcagccttgaaatcagttggtttcacatatacggttacgccgttggaaagtaccaacttagttgtaccatagatttcgccagctttttcagaaacaatcttaccgcctttaatatcttcagagatcagcggttcgttagaaactttatcttcataaggtttcagatcgaatgacttcatttgtttcaataaagcagcaatttcttctttagtagggtattttgctccttctttttccggaccggccagcaaaaccacctgattgttgtcagtgattagttgttgcatcacctgattgacagcttctacagggatattcggagccagtttgtttaccagtgtatattcaacttcaattcccggaatcggttctttttcaaggaaattgttaacgtattcgttgacgtaagaaccacttttagtcttttcacgttcgttgtaagcagattctacggcttgcaaatagttggcgcgtgcgcgttcatattctgaagcggtaaatccgaagcggcgtgcacgttccgcttcttccaaaacagttttcattgctaaatcgataccgtctattttgctgcttgcatcaagtgcgagtgcttctttagtcttggcaaggaaatagtttccatattctgcgcttgcactagtgaaaggaggattagcggtttgacggagttcgttcaaacggttgttcagcatattcatagccatgctgaccatatactgagtagcataataagcaatggtgtttttcaaagaatccggtgtagcgtcttgtttgaagaagatgttcacataaggattcttcacttccttgtctgtaccgatatagataagcggttcctgattatctgccactggatagtagatacgttcggccgggtttaccggagcttttacatctgcaaatacctttttcagtttagcttcaatttcatctacattgatatcacctacaataacgattccttgtaagtccggacgataccatttcgcataataatcgcggatatcctgataagggaagttgttgataacatcaatacttccgataggcatacagtctgaatatttagaatccggatacagagtcgactgtgcatcagtcatgatgcgaagcataccactgttgcggcttctccattcttcgcggataacaccacgctctttgtcaatttccttgtcggcaaggttgatagcgttcgaccagtcgtgaaggatcagcagacaagagtctaccacgtttatattttcagttggtacgttgctgatgttgtacaccgtctggtcgacactggtatatgcattcaggttcgtgccgaatttgataccttttgtttcacaccagggcacgatgccaagtccggtttcatcacctgggaagtgctttgttccgttgaaagccatgtgctccagaaagtgtgccagaccacgttgttgtggttcctcaagaatggaacctactttctgggcgatgtagaattcaactcgtttttcgggaagggcgttgtggcgaatgtaataggtaagcccgttgtctagtttaccgatacgaacattcttgtccacaggtaactcttgcatgggttgtgcaagtgcgagctggaaattgcagcatataaaaaggactgcaataaataatccacgtaataaatgtttcatgttctatttagtttaaataaatatttctgtgttatttgtcgttgtgcttggttgtaaatcacaaatagacagggaaaagagttattttatagcttcccgtatcctgactagcttagttaacagtccttccagaaggtctaactttaacatattggcaccatcgcttttggctacggcagggttttcatgtgtttcgatgaatattccgtcggcacctacggcgatacctgctttggcgacagtctctatcaactgcggcattcctcctgttaccccactggtttggttgggttgctgcaaggagtgagtgacatccagaatcaccggatagccaaatgactgcatttcggggataccacggtagtctacaacaagatcttgatagccgaaagttgttccacgttcggtaagcatcacattcttgtttccggcttccaccactttgtcggcagcaaactgcattgcctgcggtgaaaggaactgtcctttcttgatgttaatcgtttttccggttttggctgcggcaaccaacaagtcggtctggcgacaaagaaaagccgggatttgaagtatgtccacgtattcggctgccattgcagcttcatctgcggtatggatatcggttacggtggggactccgaaagtctcatgtacctttctcaatactttgagtgctttctcatcgccaatgccggtaaacgaatccagacgtgagcggtttgccttacggtaagaacctttgaatacataaggtatttgcagtgcttcggtgatctttactactcgttcggcaatgcgcattgccatttcttcaccttctatcacacacggaccggccaacaggaaaaagttgccggtggggttgttcttaagttctatcattttattatttacccttaattccgcaacactattataaattaaactttttaagtacctgagcaacaaaaagttgctcaggattttgccatgtcagaattttcacttatcttagtgttgcaaaaaaaacaagagaatccgacgatagacatggcgaagatacaaattaaatctgagagactcactccttttgggggattattttcaatcatggagcaatttgactccacattatcatctgtaatcgactcaaccctcggtctaaggtgtagatcgttcggttatcagtacagcgaaatcatccgttctctcatgagtatctacttctgtagcggttcatgtattgaggatgtcactactcatttgatgaaccacctctcgcttcatccgacacttcgcacttgtagctctgatactatcctcagggcgataaaggagttgacgcaagaaaacatttcatacacatcagatatgggcaagacctacgatttcaatacggctgacactctcaatactttattgctcaattgtatatttgcatctggccaactgaaagagggtgagatgtatgatgttgatttcgaccatcagttcatagagacagagaagtatgatgcaaagcctacatacaagaagttccttggttatcgccctggcgtggcggttattggcgatttgatagtcggtatagagaatagcgatggtaacacaaatgttcgtttccatcagaaggacacgctgaagaggttctttgcgagatttgaacagaatgggctcactatcaatcgcttcagagctgattgtggatcatgttccgaggaaatcgtggaggaaatagaaaaacactgcaagtccttctatatccgtgctaaccgctgcagttcgatctacaatgacacctttgctctcaaaggctggaaaactgaggaaatcaatggcattgagtttgaattgaactctatccttgttgagaagtggaaaggtaaggcatatcgacttgtgattcaaagacagaaacggatggatggtgtgcaggatttttgggaaggagaatacacataccgttgtatcctgactaacgactatgattcttccgtaagagaaattgtcgagttctataaccttcgtggaggaaaggaacgtatcttcgatgatatgaacaatggtttcgggtgggacagattgcccaaatccttcatggcagagaacacagtgttccttcttcttacagcacttatccgtaacttttacaaggccattattcaaagacttgacgtaaagaagttcgggctcaatgcaacaagtcgcataaaagcgtttgtcttcaggtttatctctgtaccagccaagtggatcaggacatcaaggcggtatgtgctgaacatctatacctgtaataatgcttacgcagatgttttccagactgattttggataatgcctacaacttatgggaatgatattgtgtattgcctcaagtcacattgtggggtaaggggatattgtaggcagaagtgggtgcttcaagttcaaattatctgcaaattcagtaatgagaggacgtgtaaacgcaataaggacgttcaagggcttagttgcggatttgaggtttaccaattacaaattatcaattagattgtgagtatatgtctctctccttggggggagtgatcctgattagttggggatgataagcgttgtcttttccgggagcacgcctacttctaaaggaaaatgtttaggcaacaaacgcccgtccaaatccaccgctgcattctgtgcccggagtacctttacttttctcgtccggtagcttttcaccactttgtgattcaggattcttccctgaatcagcatccatagtccggaaataatttgcaggaattccgggcggtagattacagatacatccagccatccgttgtatggaacggcactgggagtttgtccccatccccaggcactgcctatacatacggtcatgatgcgtccacggatatgttcatcattgatgcggagatgcattctgtagagcttccgttcgaaaatgagggagaacagggcagcaacgtatgaaaggaacttcaccccccagaaacgtttggtctgatcggtgattttaacgattcgtgctcccagtccgatattaacggcattgaggaaatagcgacgctggtgttcgtttccgtcgtagaagttgcagtagcctacatctattttcttcaaccgatgattgatgatacagtcgacagccggcttgtattcggtgctaagtccccaatatttggcgaagtcatttccgataccgttcggaatcatgccgagggcgatgttctctttgtcttcggcatcggatagcataatgccattgatggcatcgttcaatgccccatcacctcccacaatgacaatcgtgcgataaccattgttggccaaaattttagcgagacgctctaccgaaccgaaaccttcggattgtacatagtcatagtctacacctttactgtccatgtactccttaatttctttccagcgcttctttacctttcgggtaccagcttttgggttgtaaatcactccccatttcttcggttctacactcatatttgtttatctatcctattgtgtattaaaaatcgcactataataactgccaaagatactaattcccttgcagtttctcttttacaaaagctatcttttcttccattggcagctctgcattcatccaatggatcgtaaatcctcttctttccatgccgcggaaccaggtcatttgtcgcttggcaaactgatggatggctatctccaaaccattgaacatttcttcataagtcagtttgcctatgacgtataatgtcaggtatttgtattccagtccatagtagatgagatcgtccggtgtaattccctgttcgatcaatcgtcttacctcgtccaccattccttcatccaatcgttgtttcaatcggtgggtgatcttttcacggcgcagttcccggtcaatgtccactccgatgatgagactgttcagttccggaaattctctttcgggaaccggatgggctgcataatactcttcaatttctatcgcacgtatcgcccgttttacggtatccacatcggtagagttatgcaaaaccttgtattgacttagcatttccgtcaactcttccagcgaatgatttgccaaacggttgcgtaattcctgattttccggtacgggcatcagtttatatcctttcaacacggattccagatacatacctgtccctccacataaaacgggaagacagcctttttgtttgatgctttcgtaagaattcaagaaatcacgttgatattcaaacacattgtatttatatccggggtctgcgatgtcaatcagatgataggggattgtacgtccgtttacggtatagtcggccaaatcttttcctgtaccgagatccattcctctatatatctgacgggaatcggcactgataatttctgtgttgagttcataggccaaggcagcggcaaagggagttttacccgaggctgtaggtccgagtatggcgattaaatcatagtccggcatagcttcattcttttatatctgcaaaattacgaaatatttttaacctgtttggtattcaatcgcttttttatcaagattaataagggggatagggaaggttaatttgtattttaacctctaattggtggtattcaatctaataataatgaagtgtatgagaataccgccatctgatattatctactatgatatttgtgttgtttttattgtcaatctgtcatgatagtagctaatcttttgatttttagtggaatatggctgatgataggagctgacaataggctgacaataaaggtcttgtttttttattgtcagctttgtttttgctgattaaatagtgtaactatttgataaacagttgtttatctccttttttttcatgatgctatttttgtgataacttctgtatatctgtatgtttttacgttatattaccactaaggttgtgttgaaaaatcaggtgtgataactctagtatgctgatagaataacacggagatacgggtaaagtagcttaaagatactggcattgttcagctagagtgcctttattgttctgctagagtaccgttcttgttagttctccacggccgtggtagcttcttcccacagtcgtggtagcttcttctcacggccgtgggaagatctcaccacggccgtggtgaatgaatgatatcggtagcttaacagatgtatacctgcttgatagaataaagataaaggtgccttaatagagttgtgcttacttgcgtaagtctataaacctagcattcaaaatcatttccacatttatctgttgtttattgtctgtatgattcggcatacctttccgtttttatccacaccttctatggttatatcttccggtgcagtgctgtccggagtatagtattcgatagttgcttttccattggcatccagttgaagggtaggattccaatagatcgtacttcgtaaatccgagcgttggtcattctttttttcgggcgtatcataagtcggatggtagaattcgaccgagtcgctgtaccctagtggagtgcacgtgataataccttgtgccggtcttgccgggatatctttgccgtctttcagcgtaataacgatagcacctgccgaaccgcgggaacctaagatcgctgcatcggcaccgcgaagaaggctcaagctcgacatatcactggtttgtatcatggtcaagatgtcgttatcgtcttcatacaccacgtcgtcaacaacaatgacaggttgctcgggattgttgcggatatgtatttcatttccgtttgtcacgctaatgcccggaagtctggtaactgcatcaaaagctgtttgcgcaccgaatccttccagtctgtccccttcgatcgtgtaggtgttgatacctcctgtgtaaatactttctgaactggcctttttacgacttccagtgactaccacttctttcagattgtacactctcattccacctttcatgtaatattggtcgcgggtgttgagcaaataatcttccataaacgttgctgttccatcatggaaaggagacttgtgcgaagttgccgggtattgaggagtgtcaatcacgatgtccactccggcaaatcctcttttggtacgtgcctgaacaaggaaagtcgtgctatctctgaaagatgtgttcacgataaactctcctttttcgtctgtggtggtagtggcgatgatgttctgtttgggagccagaatacaaataggtcctttcttaacgttacctccaaagaaacctttgatacgtccgctgatagtttgccccttttccatatagttggtgaggttcattgaaggtgcagtcagtacattctggatatggtgtctgcgccatccgtgcgtcatcatcaggaagtctaccgtgcggagagtccggaggtcttgctgcaaaaaataatatccgggattttctacatatccttttaagtcggaggtcaatagaaaattcgatacgatattgtcagcaagcgaatccgggcggatactctttctgtcggtaatgctgatggaaaaactaccttctaccggagtaccgttatcgtcttttgctgaaatttgcagggataccttttctctttttccgtatgtcggcttatctgcaagaatttgccattgatgcggattccggtcgggtatgaaaaccaggcattcgctaagtgcgttgccctgttggtcgatcagcatgaaatgggtgatgcctgcgttgaataaactgtcgttcattcttccaaaagtcctgtcgatactgactggctgcaggatgaccagctttccacgagtgtgcgcaatcaagaataacttttgaggccattcggtagcttctgttttctggatttcgtaacggatttcctttttataatgtgtcatggaaagtgtgattcctttttcttctacagctgggaggtcgaatcgtttactgataccgtcaccggatttggcaatcacatagtaagagtttcccacagtcggattcagtgtgaaaactcccatgccgtcatgctccgagcggaaagctgtcaatgtgtctccgttggcatcgaacaggaatccttctatttctgtagaaaagccatccgatccttgagccttgaaagctatattctgatgagcaacggtcaggagagcacctccttccgggaagaacttaacatcaaagtcttttgtaaacgaaggcagatagaaagtctttttataaatatattggggatcatcgaactctacttcaatgtggcgtgtggcaataggcttcaaatccggcagggaaatagaaatcaacccattctcgtctgtctttcttttacctttatctttaatctttccgttttcaatgtagcggtagcggatggcagtatttccgaaagcctcttgggtattgctggtaaatcttaccttggctgtataatgtgattcgtcttcttgctgatactcaatatttgaaacaatcgtattatcaatcgaattaccgattttcagattgcgtgaataaaagaattccggttcctgattaagcatccagttgctatatccccgcaaataataatcacctgcagggagagtgggagggagggtgaaagcattatgaaaacccaatgaatctctacggatctttttccgttctacaatagagtcggaacggttgacaagctctgtaatgatgaagttgctttgtgtattatcttgatgtgtaacagagtttaccagatatcccttgaaccatattttttctcctgccccataaaagggcttgtccagatgtaagtagagtttctcctgtgggactttttccagtagattaaaatacgcaataattgtatcttgtacgttttgccctgacaatggggcaaaacagaacagtattccgaaaaagaaagctattaagcctctatggatagaaaatgtagttttgtttttcatacgttatgtgtttgattctacatctatgatttgtgcatccagatcgaaagcactttcttttttactgccagtatgttaatcaccgatacaacgataaataatagaatacccatactgattgctgcccataatgatccggtttccagctgtggaaataggatgcggatactgtctatgtaataactgcgcaaccaggagactaatccgatggataatacaagcacaataacgttcaatcctaccgtgagcaactgataaggcaatgctaccttgttgggactgtatccgattagtaatagactttccagcttggttgtattcttttgtaaaagcaggaagatgctcaacatcagtatatagaatgaaaggatactgataaataaacccactcccaatacaatacctacgataagacggaggaaataagttgtttttccggcatccagcttaccatcttccgtttcatatcctttcttctgaaaataactggcgatggcggaatctgccggattgctaacctcgataatcaatcgtgccggttgggcttctgcattcggtgcgaaattctcattagcccatttcataaaggactggggaacaagaatcgtattcagacgattggagaaaccgacaatgtttcctttgtactgttccacccgtccgttgccacgcatcataatgtccatttgaatcagactcattaacccttccgatagtttggggaggctgcggctttgcgcaaaaccgaagttataaaggttcagatagttgcgcggaatgataatgggtatggtatgtgtgtgttcatcgaaatgccatttatcgagtttgatgtcgacaaactcatcgggaacagactcaaaaaacatatctgtggaaagatgaataccggcttccttcattcccaatcctgctgaaactttgaattgagaaggagtgaaagctcctattgttttggtaaacggttgctttttcagatccgcaatttcttcggcagagaatgtattactctttcctgcaaaagaaccgagagcactgattttctttgtagctatgatgaaatcctttttcataaagctgtctccttcggtgaataccggaatgacatctttataaaactgtacgctaagcaatacaatcatcatgccgaataggttggctaaaaagaaaccggctaattgaccgatactgatatgttggcggagaagcttccagacaagagttggcattttatttacgattttacaatttacgatttacgatttgaaatgatgctgtgaaaagaggttgtttattacctgctacctgttattaaccagcttactacagttgaagtgtatggttgtaaggcaactcgatatgtttaccgatggaagtggcgatcactccggctccttgtgcctttgcttcggcgatgataagttcacccatgatgcggctgttatcatcgtccaggtggctgatcggttcatccagaaataaaaagtcgaacggctggcagagcgcccggataaaggcgacgcgctgttgctgtccgaaagatagcttgccggctttcacatttattttatctgcgatccccagttgttcgaagaacgataagatttcttttttctttttgcatccggtgaggttattcttcaattgcacattttcaagagcgctaagttcggtgaagatgcgtaaatcttgaaaaagcatacttagtgaatgctttcgcaggtcgacccattgcttcacggagtatgctttgatattggtttcatcgaaattaataatcccctgatagtcgttgcggtagccatagatatagctgcacaacgaagatttgccggtgccggaagcagcttcaatcagatacatttctcctttccggaagaaaagatcctgatgccatacgtccgaagtcaccgaattacggtcagcaaacacttggggaagtgtttgctgtaagtgaatactattcataccgttggtttatacatttattacatgccggcaaattgcttggcaaagtctacaatttgtttgagggcatttacatctttgtctttcaggcagaggtcgatctcgctgactttcccttccgaactcatggacaggtaagaaaccttgttggccagttcgatatatgtcttagcttcctgtcctccgaaacctgctaccattttaacgataggcagatcgaggattgcttcggcattgattgctataaataggctctttcccttcatatccgatgcataaggagcatctttgactgatttgtcggcagctttacctacgtttttgtagagtaactcatcattggttgcatacatttgtttatccttgatgccgaagaatatattcatgcctcttgtcttgtagacatattcgtctttgccaagttgcatgatatcttcccctctcttcaatcccaatgattccttgttcttgtaaatcatttcaagagcattgccgttcttcacgtcagcgtacatcatgaaagtgggagcactgctcatcgttacgttgattaatcctgcagaaatatcaccattgaacgagctgaacaactcttttacttcgtctgccttagcgatagatactgtgttgcggaattccttgttttcgctcaacaggttatacagttcgcctccttttacacctacgttgaagaacatcagggtagaagccgggaagtatttaacgaaagtattgttcgcttttccaacagattccatttgtttttttaggagagctttcactgcttcgttttcagtatagttttctgttttgagggcaatctttcctttttcaaagttcagtcctcctatcagagtgatgtcttccgctttcacttcagtaggtaatcccatggttatctgatcgcggtaggttgaaggaatagctgtcatggaagcaaagaagttaatatcacttttctgtttctccattttctggaaagctcctgatttcacgatactattgcttgctgtctgtttcaacaaattagtaatggcttctttggctttatcagtttgagttgttccgctgacattgactaccaatatagtagaactattgaaaacaagcaaaccgctgttcatcgttgtaaaactgtaaccgtcagcttcgcctaccggttggcagatctgttcttttgccatcacgtcgagtgaagcatgcaacttatcttcattgttcactttacctacaacagtaggataagggaaagaagatgaagagaacacatagaatggagattcaacatcgattcccgattcgcccggattcttcataaccttttccagttgttggaatgtggccgcattcattccgcttttcagtgcttccagtactttttgtttagcagcttcattctctttatcatccaatcccgctttgcttgcgagggatttaaggttgatagaggcaactaccgaagcgtcagccggtatcacatttgtatattccgatgttttggaacatgctgccagaaaaacaatcagtactgccagtaccgagagtcgtgaaatcgttttctttgccatacttatgttatttaaaagttgtataatcattgattcagacatttactgctgttattgattttgcagattcagcgtgtggcaggccaccaatgccgctgtttctgtacggagccgtgatttgccgagactaatcggtacgaatccccgttcgatggccttcttcacttcttcttcactgaaatctccctcgggacctatcagaacaagggcgtcttctcctggtttcagaacattcttcaatagaggtttctccccttcataacagtgggcgataaacttctgtcctttaaactcctgcctgatgaactgatcgaactcaatcatttcgttcaattttggcagtcgtgccttgagagattgtttgatggctgataccagaatcttttcaatccgttcggtcttgatgactttacgttccgagaaacggcagttgaggaaagtcagttcgtcaaaacctatttcggtagctttctctgcaaaccattcgttacggtccatattcttcgtcggtgccatggcaatgtgtaaatggcacggccataacggttcctgaaaaatggtttctttgatgtttacgaaacaacgtttgttggttgcaacagtaatttcagctttgtagaagttacccttaccatcggtaagcgtgatttcgtctccgatacttagccgcagaacacggatacagtgttgtgcttcctcttcgggaagctcgttgcttttctgtatatctggagtataaaatacgtgcataatattacttactgatttttatttcttgaattgatttgatcgcgtatctgcgcggctaactcgtaattctcatctttaatagcctgttccagtgcttcttcaagcgttctggaagtagcaccgggcaaatcatgttcttcttcagccacttcgtcgttgtccgtttcttcagaacgggttctttcttctgacgacatgtgaagacattcctgttcaagaatagattcataaataagaatcgggcagtcggcacgcactgccagggcaactgcgtctgaagtccgtgcgtcgatacgtataatctcttcgtcttttttgaggtaaatataggagtagaaaataccatcctttgctttgtaaattaatacacgtatcaggctggctcccagtatagtaagacttgttataaataaatcatgtgtcaacggacggggagttttcactcctttcagatataaagcggtagcctgggcttccgctggaccgatgatgataggcagttgcctttcaccgtccacttcgcccaatagcatagcaaacgcgcctacttgcgcctggctgttcgtgatatttataacttgtaattctacctttttgtccatcgttctcttttacttaatttgttttactctcctgctggtgtttgtacttgaataccaaggcaaacagaatgccgattaccagcgcataagcggcaaagatcagccaaatgttcatccattcgcgactcaccagtctgccgtcggcatatacagagaatgcatcaactaccgcaccgctggcatatccgcccatgatggctcccaatccgttagtcatcataaagaacaagccctgtgcactggcacggatagaagatttggcttcttgttcaacaaacaacgaaccggaaatgttgaagaaatcaaaggccataccataaacaatcatggaaaggatcagcatccatagtcctgatcccggatctccaaaaccgaacaggccgaaccggaacacccaagcgaacatactgattagcatgacttgtttgattccgaaatgacgcaggaagaaaggtatggcaagaataaacaatgtttcggacatctgtgaaatggataacaggatgactgaatgtttcactccgaaagaatctgcatattcagggatgctggcaaaactgcctaggaaaaggtcgccgtaagtattcgtaatctgcaatgctgcacctagaagcatggagaaaaggaagaaaatagccattttctttttcttgaataacaccagcgcatccagtccgaaagcggagagccatgatttgttttcagatttagccggtcgacaggccgggagcgtaaatgaataaagtccgagtagcaatgcggaagcacctcctacataaagttgtgcacttgaattcttgaatccggtaaggtcgacagcccacatggcacaaataaaaccgattgttccccatacgcggataggagggaagtctttaatcaggtcacatttgtattgctccagtgcattgtacgataccgtgttggcgagggataaagtgggcatatataccaacaggttgagtaacatggcccaatacatctggtcgtatcccgttgcggtggaagcgtagaagagacatcctgctcctgcaatatggcaaagtccgtataaacgttctgcattaaaccatttatcggcaataataccgataatacccggcattaccaaagaggcaatccccatggtggcgaaaatggctccgatttgtcctccttcaaaatgaagttctcttcccatataaccacctaatgatattaaccatgacccccatacaaagaattgcaggaagttcataataatcaaacgaacttttatactcatgacttttttaatttgtgtttctcttcacattcataaaccttgcaaatataatattttcgttgaataggtggataagtaatttgataaaaaggggataaaaatggcataaatgcgaagaaaagatgagatttgggtgtgaaaaaacaaatgaagggggtataaaaaaaagaaggctatctatcccagacagccaatctttgttaaccttaaatctaataccatgaaaaacacagtgcaaagatatagggtttatgttatacaacataatgttttctcgaaaatattctatttgttaactctaattaactttgaatcttccgtttttctgttactgccctctctaatcagccatacttccggagaaatgtctgatatccgaatggaaacttggttccggcaccttgccggttattctacgtagagtaccaatcctttcagatattctccttcgggatgatagatgtttaccggatggtcggccggttgagtcagctggtgtagaatgcgtacgctacgccctgacatggctgctgcggtaaatacggcagtacggaaattgtctttgcttaccacttgcgaacaagagaaagtaaacaggataccgcctggtttgattttctcgaatgctttggcgttcagtttacggtaaccttgcaaagcattccgcagtgcatctttatgtttggcgaatgcgggcggatcaaggatgattaaatcatactggtcgcccatgcggtcgagatatttgaaagcgtcctcggcaaacgcctcgtggcgggaatcaccggggaagtttaattccacgtttttgttagtcagatcaatcgctttggctgaactgtcgacagagtgcacgagtttcgcacctccgcgcatggcgtagaatgagaatccgccggtgtagcagaacatattcagtaccgaacggtctttggcgtaacgttccagcaaagaacggttttcacgctgatctacaaagaatccggtcttctgacctttcagccagtccacatggaacttcaagccatattcttgtgcgatattatcactgcttcctcctttcagaaaaccgttttcggggaaaaggtctgccttaaaaggaagagttgtttctgatttataatagatattttcgatcttgtcacccattacttcggataaagcttcggcaattgtcatgcggtctacatgcattcccgcagagtgtgcctgcataacagcggttttggcataaacgtcaatcaccagtccggggagattgtctccttcaccgtgaacgagacggtaagtgttgttggtcggattagtggcgatgccgatactgcggcgcatatcgtatgcaatttccagtttgcgtttccaaaaatcgtgatcgataggttcctggcggaaagacagtacgcgcacagcaatacttccgatctggaaatgtccttcggcaataaattctttttttgaggtgtacacttctacaacttcaccttcatcgggctctccgtcaaaacgagcgatagcaccggaaaaaatccaggggtggaatctcttaagagaatcttctttaccaggtttgagatatactttatgcataatgtagtctttcctcaaccctctcccaagggggagggcttcagatcgttttattattggttattaatcacttattttattacttatcacttcttccgcgggagagacagtagctgtcagcggagaaacctcccaatctcccgtctgtttcagttcttgcaacagattgtagatattgaggcatgcccatgcatcggtagcagcgtattgtttctgtccgtcacttaatacatcagcttcccagttggacaagcgttgtgatttggatattttttctttgaataagatggcgtaaatcttttgcagacttttgtcctgtattccgaattgacgcacatagtcctgtaattcgatacagctttgttgggtgaaaggtgcacgtttgtgcagcatcataaagtcgtctttcagtgaaagtcccactttgattacagccggattttctaacaagtcaaccaatggctgagtcaatcccgtcatattgagccggaataagaaacagcattcttcggaagaaatctggagaagtgctactttgtgcgattgtcctttggtaaaggaagggcgagtttcgctgtcgatacctatcactggtctggattggaggtaagctacagctttttccgtttcagcttccgactggataacataaatacgtcccggaaagactgttttcgggagttcttttagttcatctttatctatggttcttcttacaatcatttttattttaattcatcatcgtggcaatggcaaccgtcttcgtgacagtggcaatcatcatcgtggcaatgacagccatcttcttcacaacaatcgttgtcgtcgcttggttcgtaaaatccttcttcattacctacttcctcttcttcttcctcctggttgtatttcacgtcatgaagggcgcgaagtgtgtttaccagtttctgtccccacagtgtaccgaagttttcctggcagatggccaatgaatcattcattgtttcgttcagtcccagttggaagacaaatatgaaatctttaatatcctgataaatgtcggccaggtcttccgatatagacttcttgataggttggtcgctatacaccatatcttgcacgaatacgtccagataatcatccttgtcagccatcaatccggaaaggttgatacgcagaatttcgtaaatctcttctgtgacatacgtttcaagtgcttcgtccccgatagtctcacatttgggcagcatagatgctttgagatagagtaggggaagtatttttaatgatgtatcaacgaaagtgctacgcttcatgcgttcggcacgttcgagaaatgcacaaaattcggcagctaccgttacgaactcaattacgtttttatcaaatatcgtttggctttctttttccatgatctatattgatttgaaacgcaaaggtaagaaaaaggattgaatgagcgtagtgctcgttatttttttattatttttgcagcttagaatctcattccagttttataaaaaagaattaaagactcatggcaaagaagaaattagataaggaggcggaacgtactccctcttcccccagtaaaattttggctgtatttaagaatgaaaccattcattttgtaatcggattgatgctggtcatcttttccgtttacctgttgttggctttttcttccttcttcttcacgggggctgccgatcaaagtattattgatagtggcagttcggcagatttggcagctgttaataatcaagtgaagaattatgcaggttcacgcggagcgcagttggccagttatctgattaatgactgtttcggcgtttcctctttcttcatacttgttttcctggcagtggcaggattgaagttaatgcgtgtacgtgttgtacgtctgtggaagtggtttatcggctgcacactcttgctggtctggttctccgtattcttcggatttgcctttatggatcattatcaggattccttcatttatttgggaggtatgcacggatataatgtcagtcgttggctgatttcgcaagttggagtacccggtgtgtggatgatcctgttgataacggctatctgtttcttcatatatataagtgcacgtaccgtcatctggttgcgtaaactcttcgcattgagtttcctgaaacgcgaaaagaaagaagaaaaggagaatgttccggaaggagaaggagatccggaatttacgacctcccaaccgcaagaagtggagttcaatttgaaacggacgtataaacagacacctcctccggcaccagtgatggatattcaggctgaagaacctgaagacgactttcctattaataaaccggaaaaggaagatacttccgtatctgacgaaagtgaaggagtgactatggtatttgaaccgactgtttccaatcctgttcctattgtgcaggaagactctttggaagaggcggaacccggatttgaggtggaaccggcagcttcggaagaagaataccaaggacctgaactcgaaccgtataatcctactaaggacttggaaaactaccgtttcccgactatcgatttgatgaagcattttgaaaatgatgatccgacgattgacatggacgagcagaatgcaaataaagaccgcatcatcaatacattgcgcagcttcggaatcgaaatcagtacgattaaagcaactgtgggacctacggtaactctatatgaaattactccggaacagggagtacgtatttctaaaatccgtggtttggaagatgatatcgcattgagcctttccgctgatggtatccgtattattgctccgataccgggtaaaggaaccatcggtattgaagtaccgaacaagaatccgaagattgtttccggacagagtgtgatcggaagcaagaaattccaggaatccaaatatgacttgcctattgtattgggtaagacgatcacgaacgaagtctttatgttcgacctttgcaagatgccgcacgtattggtggcaggtgcaaccggtcagggtaaatcagtcggtttgaatgccattatcacttccttattatataagaagcatccggcagaattgaagtttgtactggtcgacccgaagaaagtagaattcagcatctattcggtgattgaaaatcacttccttgccaaacttcctgatggaggcgaaccgattattacggacgtaacgaaagtagtgcaaaccctgaactcggtttgtgtggagatggatacccgttatgaccttttgaagatggcacatgtgcgtaatatcaaagaatataacgagaaatttatcaaccgccgcctgaatccggaaaagggacataagtttatgccgtatatcgtagtggtgattgacgagttcggagatttgattatgaccgccggtaaggaagtggaacttccgattgcccgtattgcacagttggcgcgtgctgtcggcatccacatgattatcgctacacagcgtccgactactaatattattacaggtacgatcaaagccaacttcccggcacgtatcgcattccgtgtatctgccatgatggactcccgtactattctcgaccgtccgggtgctaaccgtttgattggtaagggggatatgctcttcttgcagggagccgatccggtgcgtgtgcagtgtgcctttatcgatacgccggaagtggaggaaattacgaagtttattgcccgtcagcaaagttatcctactccgttcttcctgccagagttcgtgagcgaagatggtggtagtgaagtaggagatattgatatgggacggcttgatccgttgttcgaagatgcagcccgactggtagtgatccatcagcaaggttccacttcgttaattcagcgtaaattcgctatcggttacaaccgtgccggacgtattatggaccaactcgaaaaagcgggaatcgtaggccctacccagggaagcaaggcacgcgatgtcttgtgcatggatgataatgatcttgaaatgcgattgaacaatttacagtaaccgttcgtttattaatcaaatgagaaaatacatttttagtgttttaatagctttactgtctttgcctgtgattgcccaacaacagcagtcgcaggctaaagtcattcttgataagacggcagaggcgtttcgtaaagcaggtggtgtaaaggccgattttactgtaaaggctgtgacgaacggtctggtagaaggtgttgaaaatggaacgattcagttgaaaggagagaaattcgtactgaaaacgtcggatatcatcacttggtttgatggaaaaacgcagtggagttatatgacaaagaatgatgaagtgaacgtcagcaatccgacacaggaagagttgcagcagattaatccgtatacatttctatatatgtatcagaaaggattctcttataagttgggagcaactaagatgtatcgtggaaaagctgtttgggaagtcgttttgactgccagagataagaaacaggagttggaacgtatcactctttttgtgacgaaggatacttatgaacctttgtatattttgcttcaacagcgtggtcaacagacacgtaatgagataaccattacaagttatcagacaaagcagaattatgcggatcaggtttttacgtttgataaaaagcaatatcccaatgcggaagtgatagatttgagataatatacgtttataacaaaacgaaaaagataaattaaaatggcagaaatagaaaaagtaaaatgcctgattataggttcaggacctgccggatatacggcagcgatttatgcaggacgtgcaaatttatgtccggtactttatgaaggattgcaaccgggtggccagttgactactactacggatgtggagaacttccccggttatccggaaggaatcagtggtccgcagttgatggaagacttgcgtgcacaagcaagccgtttcggaacagacattcgtttcggtattgctacggcggccgatttgagcaaagctccttataaaataacaatcgacggtgataaggttattgaaacagaatcattgattattgctaccggagctactgctaaatatctgggactggaggatgagaagaaatatgccggaatgggggtaagtgcttgcgctacttgtgacggatttttctatcgtaagaaagttgtagctgtagtcggtggcggtgatacagcgtgtgaagaagctgtttatcttgccggacttgcatccaaagtatatctgattgtccgcaaacctttcctgcgcgcatcgaagattatgcaggaacgagtaatgaaccacgagaaaatagaagttctttttgaacacaacgcagttggtttgtttggcgacaatggggtagaaggtgtaaatctggtgaaacgttggggcgaaccggatgaagaacgttacagcttgcctatcgacggtttcttcctggctatcggacatcaaccgaatactgaaatatttaaagaatatgttgatacggacgaagtgggttatatcatcacggaaggtgatagtcctcgtacaaaagttcccggagtttttgcggcaggagatgttgccgatccgcattatcgtcaggctattacggctgcgggaagtggttgcaaagctgctttggaagcagaacgttatctttctgccaaaggactcatttaatccggtttatatccgaccataggagggtattaaaacccttatgaatatgaaaatcacccacgctagagtttaatctgtagcgtgggtgattttgttgagaggggagtcttgctcccctttattttataaactcaaagcttttcgaacaatatttgtcgattgtctttggttaatacgcttctatttcatctatccataattcggcaggaatgatttccggcccgttattcttttcaaagttgacaccattacgcagtgtgccgccattcttgattttgactttcaggaatgtagcctgtgccggttcaaattcaatggaatcggtgaatgcaattcttcctgtttccggataatcgtgtttcaaagctttttcggctatccgtgtgtattgcttgccgtctgctgatacttctacagcaactccttctgcaggaagaattctcatggcaggattgaataaagaaccgaaaataactttgctgacttgtgtcggtttatccagatgaacgataaattccaagtccttaccctccacgatgccaaaactacaccacggagtataagaagcattattgcctcgtttgccgttggtcagtccaaaggtggttttgtcagctcctaatacatcgttttcatcgaatatatcgcctgtccatcccatcgtataattaaccgtataggactttcctgtcaataaattgccatacagtggcttgtgagctactttgcccaacatctttccgtctttgaaagcagcggctttcaggtcgatattaccttcaagaacgaaaggcttttcatataagatggacactttggacggttcgctgccgtccgttgtataccggatttccgcattcgggtagaaactttccagcaataccattaaagggccgttttcatctgcgtgcgtatttatatttacgtcatagaagttgagacaaggttgggtgttcataactttcaaacgttcaaattcagtcaccatccgttcgcagaaattcttccagtctttgtttgcgttttgtgtccaggccgtttcggcgatagccattgcacgtgggaaagcttggtagtctgtacgttctgaagtctgcatatattctctccaaatattaccttgtattccgatgatatgcttcttggcaagctcgtcagcgtcgtccggaacagggttatagctatatgttttcttcaaggtattgtatccgccaatagtagtcggagcaatttccggctcttcctgatagtagtccagatatacataaggattcggagtcatgatggcattatgccctgctttggctgcgttcataccgccttctacaccgcgccatgacataacagtcgcattgggagccagaccaccttcgagaatttcatcccagccaatgatgtttttgcctttgctattcaggtatttctccatacgggtaacgaaatagctctgcaacttatcttctttgctgtgctttattccgtctatcttactgggagttgtatcatctttcaaccctaactggcggattaactgctggcagaaagcactgttcttccacgctgtcttgggacattcatcgccaccgatgtgaatgtattcgctggggaataattctataacttcatccatcactccttcaaagaatttgaaagtcgtttcactcggacagaatacctgttcgaatactccccaggtaggagatactttgtaagtctgtgtagagtcgcatgacaattccggataggcggcaagtgcagccaatgcatgtcccggcatttctatttcgggaacaacattgatgtatttacttgcagcataagccactacatctttgatttgctcctgtgtataataacctccatgttcttttccgtcgaatacttgcggatagtttacatagtaatagtctactaatgtcttttcacgtttggaaccgattcccgtcaatttgggatatttcttgatctcgattctccatccctgatcgtctgtcaaatgccagtggaagacattcatcttgttcatagccagtaagtcgataaacttgtaaatgtagtcaatcggtacataatggcggcaaacatccaacatgagtccgcgatgaacaaaacggggtgaatcttcaatttctacggcaggaaccgaccagtcagctttcttatccaactgctttccgtaaattgccggagggagtaactgataaagagtctgcactccataaaagaatccgtttggctgggaagcggtgagtgtaatgagactgggagtgaccgataatttataaccttctttcggcataccttcctgtacaacaaaagagatcgccgtttttccatctgcactttcagcttctttcaaggagattcctgctgtcagttttagttgttcggccaggctgtcggcaatgctttttacttccggagcatccgagggaactacgaggcagactttgttgtttagttcaaagcgtccttcctgtggaagaatctggttgggtttgggaacgatgttgtactcgttcgccgcttcttttgtcttctggcaactgggggtaatcattagcaaggacaaaagaagaagagaaatacttttcttcatggtcaaaatgtgtgttaagttataaatagatttgacagggcaaatgtacttgtttatatgataagttccaataatatggaaataaaaaaagccggaatgatgtccggcttttagctaaagtttcagattaatgtagttatataattaagagagagtttttatttcagtagttgctcttcgatgatttgtacgtacttctccggagtagctccgacttcaataatcggtttgccgcctgcaggtatgaagaataaggtaggcaatgcctgtacaccgaagtgattgcataaatccttttctttgtccgcattaaccttgtagaatacaactttacctttatacttttcagccagcttttccatttccggaagtaagcgcatgcaaggtccacaccaagttgcccagaaatcaattataaccggtttctcgccattataaacgaaatcgttcccttttctgtagtcgaagatgtgttcgaggaagaattggcgggtaatcggattcagtttaccgtcttcaactttagtttccgttactttagcttccgcttccggtataggaaccatgtcaaacggctggaaataaattttctgatgaatatagtcaatggatatgattccgtagtccagtatctttttgcctaatacggagcgtttcaggtatggattcttcactgccatggcatcctcaatctttgtttttacaaacatggtttcaggtaagatgaggctttcctcttcttgagtcgcttctttatatccattggaaactttttggttggttcctttggtatattgtgtgctccatgtattgaaatctttttcggtaagattcactaatccttcgctccatgtatccagaacaagagaaacgggttttccctgaatggatattggacatacgattcctaatcctgtaattagctcaaagttctcccggtagtttaatttcatgtaagaaggacgatagggctgcgtaattgtgagttttttccgctgcatatcaatagtcagaacggaagtgcggaaaatagcaccgcttaatacacccatcactcccagcttgcgcagatatggttcgtcttccagagtgaaagcaggcagatcgttgttaaacgtgttgttgccaatagcaactgttgccatttcatatacttttccaacaggtacttgtttgaatacaaaatcctgataagcactaaaagtaccgttcttccccgtgtcgatgcgtaacttcttgagagcctcaggaagcagggcgttatgtcctgacagatcgaggacgaagtctgccacttcgccattaatggcggcttctacgataatctttccatcaatggttttgaatggaatgacctctgtcatactgttctgtgtctgtgcactgattcctccggcaatacaaaatgcaagtagacagagatacatctttgttattattcgcttcatatcttttttctgtttaaagtttatttctctttcctgatttcaatctttttctcttgattgtctttcttgacaataatataaccggtatcaccgcggatggcgttcatgatatcttccacagccatttggctcatgggacaatcgtccaaagaagtaccgttgatgttaatcacctggtcgccgaaagcaactttatctttcatgctgtcccagatcgttgtaatttcgaatctgtcattgcgtggcagaatactcacgttccagagagcgggagcaccgcccatgtcggtttttccttcttcaaacgggaaaaagtagaatcgtctgcgcatataatcgataattactttaccgtattccagtaaatccaccccgatgatgcttccattcatcactgtggtcgtactacccacgttcgtgaattctttccccatgatgttgataggaggaacagtcaccttctttatatccaccggcttgcctagacctgttattccggcagctacgataccatatccatggttagtaactttcgaaatgtcagacagcctttcataatcttctgtagaataaagcagaaagcctcccgcacctgtatcgaacagaaccttgaagtcattgtcccctaagcggacattgacaatggagtgatgatccgtctcatccaacagcggaatcccatccgttacttttagtccttcgggacgatacggataattgataaccattattttagaacgggaatcgaatgtgactaccgactgtgcgaaagcgtctcctccaagaataccgacaacccctagtccggtgaagaatggattcttaggcagtaccatcgtcttcaactgcttgattttatagttttccccgatagaaacattctgtacgtgcgcttcctgataattggagccttgtgcattcacatcggagatacgcatatatcctgcggcagtagctttcatttccgttgcggcatcatacatcgttccggttcttcctcccgtatcgacgatatatttcacttttataccgttaacagtgacggggataatgattttctcttgtataaactcataaggaatggtgtcgcaaaccttattccggatttgcgctgccattctttgtccgcagtttagaaataatagcagccataagccggtcagtattcctatacttttcatattattctttttcatagataatatcctttactccggaagctgtctcaatcgtcagtttcgtcttctttttctctttcaattccggtattccgttcagaatactttcgcagaagtcatatttcttagcaggtttgccattgattttaactaccttgtctccgactgctatcttacctttcgtactgctccatacggtagatacaaacaaatctccgtctttgaccgttaagtcaaaattgttaccttgattgtttatttcattgtccggttgaaatgcttcgaaatagaatcttccgcgtggatagtcgatggtcactttaccgtattgcaacagtttgacacccaataatgtgtaagggtgattgttggtgctggttgttacgttacggaatttggtggctccgactgatagcaatggaatacgaaccctgtaagaagaagctttgtccgcctgaccggatactccgatactcccttctccatacccttcggaaaccacttccatagaggcttccggtttgattttttcaaaatcactttcgataagtgataacaggctgggactaccagtatcaaataatacatttatattgctgaccggagctatctgtacgctgacgatcggcataccgccccctttggtgaaattcaacatctttcgtaaagacactgtcgatggcttttcagcagaggtaactataatatttttggcttgtgaatcaatagtgacaatggtgttggcgaataaatcactgccgatgatgccatctactccaaaacattcccagccttttacttcatcaatgaccagtgacggagcatttttgaaattaataacatggtcgggggtagtcaggttctctatccgggtagtcttgtaatagctttccacgttattcacatccgttactttagtcgagtcggtggctgccatttgcagtgcctggcaggcttgagtcgtgagtgccgtacgtcctcccgtatcaaatatgaaaggacgtgccgtgccgttcactttcatttcgataatcatcttttcacctaccatccggtaaggtatggttgccttatattgttgggcgaatacaggaaccgccatgcaaaaggcgacgacggttcctatcatacgagtcgtatacttcataagctaattttatttgctgactttttctgcttccaaaattgcctgataagcgtttacaatacctccggaaatacacaaatcatcgaaaaggaacaagtcttgtgaaggactgtcgtttacgcggattcctttttccacttccacccctttgcgtgaagtgacactcttcagtagtatgtcacggatttgcgagccggttaatttaggaaaatatgatttcactaaggcagctacaccggctacagtagccgaagccattccttctccagttcctttttgataagtgtcacccatataagatgaataaatgtctgttcccggagcataaatatcgagagcagttgcaccgtaattggtgttcaataccggatttccattcttgtctgaagaagcaaccaccataaaattggtaagttctccgtcttttctcatcttccggttagggaaaaactcgtctttatccatgtctgctgacagatcccagaccggaactattaccaatgctcctttcttttcagcttctttcagtgcatctgctacccattgtctctgttcttccgggtataatgaattttgttccggcaataaaataacatccgctccatggtttactgcatactggatagccagtgccatatcttttaaataaggttctccttctcccgggtggatgcgtaaagtcatgatttctgcattgtctgcaataccgttacttccgataccgttgtcacgtttagctgcgataacgccggccttcattacgcctgttgccgcatcagatgtcaacagtacattattgccgtaatgcgtgtcgttaatatccagaggattatcacctacaatttctttccggttatcagttccgtatttctttaaagcatcttcataggaagttttagctgtttccacactttttttccccattctttggtatacgagatcccatttgtccgtttggtaaatgctgaatgaataagcggtaaaaacaaaagcaatttcagaaaggctgtctctttctgccttaggatcatagcagctctggaaatcatcgacagttagctcttttccggggaaacgctttttcatgtccttatcaaacttctcaatatattcttcaatgacataagagagttgcagtccaccgtatgaaccaccgattctggattcaggcattactttataacgatagtaattgtattcttccaaattttccggtgcgggtacttcctgacgttttccgttaatgattttataatatttctttccgtcaaagatataatctgcatatttatctttcagacggaaaaattcacgttctccttcgcgtgtcagagattccatgacctgaccgtctttgccaccgatgaaattccaaccattgatgtcgtctatccaaccattcttgtcatcgtctttctggtttagtttttctttgggattcacccagatagcctgtttcagatcttcgtgttctacgtccattcctgttccgatcaatgcaacaaccggtcttttctttgctttctttttgttggcattcaagtaatcataagctttgtttacttcagctccgtatacactgtcctggtcgaaagaacagttaaaccagtccagttcggattgttttttttgtgtttctgcctgctgtttgactaactgggctgatactgtcatgctgataaaacagcatacgattggaaatataagtttcttcattgtcgaaagagttataatttatatagtttgtttattgtcttatttttaaaatggcttctcgtacttgttcccctcggacattacgtgcagcgagtttaccttctttgtcaatgacaacaaggaaagggatggagtagaaaccgtaagcagtctgaatagcacttggagtcttgctgtttttgggaaatcctgttttatcccatagcatcacccacggcagtttttcttcatccagcatttttctccattttgcttcgctgtcatccaacgaaacactgatgaattctaaatcatctgctttcagatcattgtatattgtcagcatactgcgcatctctttgcggcaagggccacaccaggaagcacagaaatccagtacgacaatttttccacggaagtcctttaaacctatgctctttccattgttgtcaatgaacgtaaaaccaggacattctgcaccgataatctggtgggagaggacttctactttgttgattaaccatttggcagacaacgaattcctatcttgttccggtatcatatccaataacattttgttggatgggtaatcattcacatctgccagataagctaatgcggatgccatggcagatgtcagcttctctttggcagaagtcgggattgttgctttatccggatctctttcggtcggcatatagttttgtaaagtcagaaacggatcaatgccggtgaatgaaagtgaactttgttcgggattcttttcatcgaaaaaaccatgaatggttacaggtctgttttcgaggtatatgttttgctccgtattcccaatatatagtgtatatacatcggatataatgtcttttttttcggtttcgaatactccattttggttaataggacaacttaaaatgaggttcccattcaaatccttaacttgcaaagtggttggtttgagtagtctcaactttcctttgaattgaagtccgctgtcgctccatagaggagtggtgctgcataagagcaataatatcaatgagagtcttattaatttcatgatttggagtttataatatatggtaaattctaaatatctttattcttattttatctatcctttaatgaaatgactaacttaatcgttatggaagagtttctttaccaatctccccagtctccccaaggatcatcatcatcgccatctccttcatcagttttcggtagttccggataaggtttaatatcccaatcttccggtcctttggcgatagcttccaaatcaatattatatttttttagatagtttgtcacaaaatcgaacttagtgcttagaaatggataggttgccgaaggaaacattacttcccgttcttctttggtatgacgcatggctatttgcagatagccgataaatgtttctttggctgttggaggattatcggaatcgggtttagaatgtttacctgataatgaatttacattaccaggatagcctcttttaagataataattaggatcggctttactttcgatgtcttcacttctgacaatcggagttaaatggtcaaatcctgcatcaaattcatcttcgggtatgataatatttccgttggcgatagctgtatttataacttcatcaattattttgaagcggcgtatggtaaaactatccttattgccggcaataggagttttccatcctgtgattgggtcatcgtaagtactgtgggctttatctccccagaaacaagttatccagcagtcggtttggccgtcatcatgctcgggcagtgcaacataatattccagtactcccggtataatggaagtaaatacagaataattgtataccatataccagtacatgggaaatactctatccgtaacttcccggttgaggtaaggaaaaatgtggttcttcataaaagtaatataaaatgctcccatttcgtcattgagacaattctcgaagactcttgatgaactaccgactccaccattagtccaatttttattgagatctttttctgtgatatctttatatattattttcactccgaagtcttggtagattttcataacatcattgtcccatgaattatttccctgcggaaactcaaatcctccggcaagtgcaagtggatctggtgtcgggttgataatatcttcattataacaggacgagaatgtgagacagaatagtaatatccatacattatatattggcttcatgattctctgttgtttaaaattgacgatcattatttcttatatttatagttattttgtaacaggaactccagtccgttccggtccgaacggattttgttccaataataagtttctttgcaacacttctgtaggaataggtaatacgtatgaaggatcgttttttgttagtgtataaactttgccttcccatttgtgctgtatggaaggcataccatatcgacgtaagtcgaaccagcgttgtccttcgtagcaaagttcttttctgcgttcttcacgtatttgggtgatcaaagcatctccgctcaatccggaaaaagacggtgcgtttcctctatcatatcgtttctccagcaatgtattcatagcggtgatggcatctccttcggcttggctcatggcagcggcttctgcatagtttagataagcttctgctattcggaaggagagtgcaaaataatcactgcttccggaagtggggacagaacgtagtgtcttatatttgccataggggagataagtatcataaaatgtgctgttctccggaaccgcctcgttatattgcatttccctagtaatataacggtctttgcgtaagtcaccttctgagaaactgttgattaacccgtctgctgctttgaacattcttctggtcttttcttcatcgctgttttcatctttcttatcgatataaccttcgtattcacctgtcaagtctctgatagttccataactccagatgacttccggcgaatcatatgtattgaatgtgtaataaggttcttttatacctgcttccggtgcaggaatagtattcagatcgcgtagtgagaagttccaatctttgataactttctccgcatacgttttagcttcttcccaattttccatatatagagctacacgtgattttaataattgtaccataggtaaactgacaaggtagttcggttcatattgttgtgtggcggagagagttaggaataaacgttctgcttcgtttaggtcggtaacaatctgtcggtatacttcttctaccgtgttccgtctcatcaatatattgtcatcatctctcattttactgtccagcttgagaggaactcccaatgattctttgttataattatagggaagtccgtactgattgactaacatataataataaaaagcccgtagggcataggattgtgccttaatataattcttttcaatttctgtaccggatacttcgtcaatatagtcaagtgtggcattagctcctaaaatatattcataaaggttctcccaagtattgactgtttgttgtcccaatttttctcgtatttcgaacatattgggttgccagctatacagtatctcaaatatttccatatctgctttgtcgttttctgggaattcgtaaccttccacctgattctgctcgacatcatctgcgagtatttcctgatagttgagaaatttggtatccttttgttggggataggcttctccgataagcatctcttgcaatgcattagcgtctttaggtatatattggctctgtgactttggctctaagaaatctccgcaagcggtgaggccggtcagtgtaattgtataaattaaatatttaagtttcatatctctctttgtttattgtttaaaatcctatattaagtcccaatgagaaagaacgtggcatgatgctgttttctaattccggatcaaaaccattaaaacgtttgctggctattacaaatacattgtccatattaaagttaatagacaggtttttagcatgtatcttgtcgcaccattcttttttcatctgccaggataatccaatgttacggcaacgcaggaatgaagcgctgactaccatagcatctgatttttcccacatataaatgggtgattctgcggtctccgtgttaggcaaagtccaagtgatccctaatggccatatcggcaacccggggatatttgtgtaagcttcgtctcctgttttttgccagcgattcaataaatcgcggtttatattcttggttggatcgggcatcatattatgttctcctcggaaatcattgtaaggtgacgtcaaacgctttttgctacctaacaaaagggaaaagctggtatttagtgacaaagatttgtagcggaaactcaaaccgagacctccggtgaaatacggctctttttctccggaatatacaaggtaagtggtcgggtcgatgcctttacttttttcttcttccgggacttcaacatagttgaacatcggtttgccgttacttccatcaagaccggcaaaggaatatgaccagaatccgcttaacggatatccttcttttaatatctgggtgttgcttccggtcaagtacatccccgtggttctgtcaatcgtggtttctccgcctttgttccagtttttagaggcattcaggttaatattcaggctgaaatcacgtttctgaacaggtgtgaatgataacgtgtattcaattccccgattgtaaataattccgccgttacgtttcatgtcgttaattccatattcgaatggtaaatctacggtgattaccgcattggaacgtcgggtgtagtattccagattcatataaaacatatgaaacagttccaggtccacaccgaaattccagtttttggtacgttcccaggagagatacggattggggatctggctaatagtggagtaatatcgattatatcctgcttgtactccgttctgacttaagattagttcaggactttcacgtgtcaaagcgtttccctgaataccaaatgttcctctgaaattgagtgttgtgatccatttcagatgcttttggaagaaagcttcttccgatgctctccaggaaaaaccgaatgaataagtcgggtcgatacggtgattgatatcctgtccgaaaacgttggaagcatcatttcgtacattggcattgactacatagcgattcttgaatgagtatgcaaaagtagcgaagaacgaaaggaagttgttggtattgtttgttcttttccaacctctgtcataaagttcttttaatattccccagcctgttggacttccgcccggtgatactacttggcttggtatggtaggcgctacaatacgttcacctctgtccggtacatatccccaaactgtattggctgttcctttagctgtagacgagcgaagttccatacccaatagcgcattcaatcggttattaggattgaatgctttgctgaattgtagcttgttctggatattgtaagaatactggttattgtcgtttgtgtacaatctacctccgaatggaagctgtgcagctttaaaatcggcactggtgggagtaacagaattaaaatcgtaaccacgatacaggttggcaatgtggtacgtgtgttcggtagcccagctttcatttgtactgttattagtcgaataaccgcctgtaaattgataagttaaccagtcaaggacatgccagttgacatctaaggaagcggacatgaagttggagcgtgcttttgaaccgctgttgtcccgttcattgataaaattgtatgaaagggtttctttatttcctgttttataatagtatccgttttcttgcatataataagcatccgggtcgatgatacggtttgtattggtagcataacccattggattgatatcgtcgaaaaagccgttagtagtagaaacgctaccgtttaaagtcatactgatagtcagtttttctatcggacgtaacatcagagcgatgcgacctgtcatacgttcgttatcattgcctatttcctgaccttcgctgttgttatatcccatagatgccgaataactaaacttgttcgttccaccggaaacactaacgttgtgactatggctgaacgaacggcgtgtcaggcgtttgaaccagtcagtattgcgggtttccatgtcgttgtaaagttttctatattcgatatcagaaatgtcatgttcctgcaacatccgtaatataccttcataggtgttaggatccttataaggcattgttgcgtaagtgattcctgcatcgaacgcctcttgtgagaaacggatgcgttcttgagagttcataaagttgaacattccataattagggcgttgcccgatgttaaagttggcggaatagttcacagtcaatctgtcagtggtattctttttggttgtgatttcgattacaccgttagatgcttttgaaccatagatagcagtggcggaagcatctttcaaaattgtgatgttttcgatgtcagcggggtttagccatgaaatctggttgccgatgatatcctttaaacttttagtcatcagttcgccgctatctagtgttacttggaaatcttcctgaataataccgtctactacccacaatggatcacgatttccttgtagcgtactggtacctcgaatctggatcttaggcgccgtacctacacgactacttgagttagtaaccaccatacctgctacacgtccttgtaacatttggtcgatagtagtgtaggaaggtattataatgtctttcgcttttatcgtagtaatggaaccaacaaggtcgcggcgttgaatattctgataaccggtaaccaccacttcgtcaatttccgtactggaactggtcagagtgacattgattgttttcttacctgtatatttcaacgttttcttttccattccgataaaagaaaaagttagaatcaatccctcttgtgccggaatattaaaagtataatgtccgtccaatccggcgatggctccatgtttggagcctcgaatcgtaacagtggcaccgggtaatgcttcgccactggcatctcgaatccaaccactgattgtaactttctggctttgctttttctttataacaattgcgctaccagagatttcgtaagtcaggttagtgccttccagacattcatccagaatttcagtaattgtcttatcttttgccttgatggtgatatcggtcacattagcaatgtcttccgttccatacataaagacaaatttcgtacgattctgcagataccagagtgctgcttccagcgtttctcctctcaagtcgatggagattctctgattgtcctgtgcttgaatcatgagtgaagaaagggagaatatccataaaagacagaacttcacaaagtttctgcttgcataagataccacccacggcagggattttactcgttttttcataatgcgttagttatattatgtattattactgtttgtaggaaatgtgcaggatgccctcccgttgtttgatattgaccagatttaattctgtaatcatgtcgataatcgggttcatgttggcgtagcggttaaggtaagctccgatacgcacctgtttggctgcttcgtcttcaaaagaatattggaatccataccatttggacaggtatgacatcacattctcaagagggacatttaaaaagataaatgatccggattcccaagatgtatacaaatcagtgtttacgttggcgacggtatttgtaccggtatttttattatatgtatagtgctggttgggaactaattcgaattcttcatttctactgttgattcttactgttccactgattaaggtcgtactttccgtatcttcatcagcgtaggctcttacgttgaacgacgttcccgtcacccggatagatgtatgcgatgtttttacgataaacggatgctccttgtccggggcaacatcaaaataagcctccccttcaatttgcacaatacgttctttactactgaaacaaaccggataagtcagccgggtttccgcattgagatgtacccttgtgccgtcggaaagcgtgataaggcattccatcccctgcaatgtgcgtagtgtgttttggatttcttttacttgcggtttgttggcgggaatctgatagttaatccctttcgaatcgatcacaaatgctctgaccgcattctccggaagattattgtcggaaagattgaaagatttgccgtcactcaagatcagttccccgccaagggttcccggagtgatgtcgctaatcgtttcttcggatatccaatgatagataaagtaagaagcaggtactaataacaataagatgagagctgcatatttcagactctttttccacgaaaaaacagtacccgattgattgcctcctaataacggatagactttctcccacgctttttgtgaagagaagctttttattaaccggctgttttcttcatacgtttccttatttaatatccggtcggctatcttttgatgttccgggttttcatccaaccatgcacgatagttcttttcctcttcgggggtagacgaatgagtaaataaggaagctaagatttttgcaattttaaatttttctttaaatgaattcatcgttttttcgatttgttatataagtaaaacaatccaatcgaaaaaacggggtaatcaaaaagttactttatttgcataaaaatagtaataaggtgtaatttatgcctttgagactttcgcgaagtttgcgataggcgaatttctttaacgtatggacagtgccttctgaaatttgcaatttgtcagcaatctcatggttttttaaccctttcatagaatataagatgatatttcgcatttgggtaggcaattcttctaccgctttgcgaaccatgtggaatgtttcctgttcgataatggcagcttcgaagccactatcgaactcttcctgtccagaaaaatagggaatatctaattgctcatgttttaagtgattcagacatttatttcgggtgacggtataaaggaagctttttactttcaaaatgtcgtcaaaatcttctttccgttcccaataagctaacaatacatcttgtgcgatgtctttgcaaacttctttgtcttcaatatagtgggatgcgaacacgcaaagaataggatagtagtcatcaaatagctttttgaaagcctgtttgttgccacgttttatgtctgcaattatattttctatatgtatgttcactatttagggtggaacgattggtgcagaaactctcttacccaatcttgcttattttcttcagcttttcttcttcgatgattttgatttttcttccgtcgatagtaatcagtctttccgtagcgaattgcgacaaggtacggatagcgttcgaagtagtcatattggaaagatttgccagatcttcacgtgaaagataaatgctcaacgtagaaccgtcttcttccagtccataactttctttcaggaagatgagtgattcggccaagcgtccgcgaatatgtttttgtgtcagattaacggtacgttcgtcagagatacccaagtcaatggaaagttggcggataaagaacatggccaagtcattattttgggcaaccagcgtagtgatggcactcataggaatcaggcaaacaacggaaggttcgaaagctgctgcggcagttacaaaatcttgtttggcaaaataagcacgatatgcaaagtattcgcgtggtttaatcatgcggataatttgacttctaccccccacaccatctttgaagattttcacttttccactgatgagacacatcagatgatgtggcgtttctccttcacagtagatggtttcattctttttgtaggtttgtatcgtataattattcatcagaaactccttttgctcattgtttagaggagctaacatatcggataatggttccgaaatatcgatgtctgacatattcatttttaccatgagtgctacaaaactgtgttatacagcacaaaagtaaaaagaaaaaatgagaaaatgaacgaatctataaaaagattgcacaaaagtgggagctttcgtgcaatcttgcagacattttatttggtaaacaacagttctctatatttaggcaacggccatatttcgtcatccacttccatctccaggtggtcgatgtggtcgcggatttggtcaagatacgggcgtactttttcttcgtatgcgaatgccctttctttgtagttttccatgtggttggctacttttcttgcttcggtcatgtcgcgcacgagtactttgatagaagtgacccggtgtgaaatctcacgaatcagttctttacggtcggcacttaatacttcatattcttcagccgggaatatttctttcagtccgcgaagattttcgagcaaacggttctgataggcaacggcagttggtacgatgtgattgatggcgaggtcgcccaatacacggccttcgatttgcaccttcatggtgtatttctccagttccacttccagacggctgttcaattcggtctcgttgaagatacgttcgccgataagtactgatttggattggttatcaatatagtgcatcagggcttccggtacgtggcagatattagtcagtccgcggcgtgcagcttcttgtttccattcttcggaataaccgtccccttcgaaacgaatcggctcggaggcgataattgtttctttcagcaggcggaagatagcttcgtctttgccaactccttcttccatcagcttttctaccgatgcccggaattcgttcagctggtttgccatggccgcattgattgcaatcatagaggcagcacagttggaagaagaacctgcggcgcggaattcgaaacggtttccggtgaatgcgaaaggagaagtacggttgcggtcggtggtatccagtaaaatttcggggatacgtccgatgcctaacttcagtgtggttttttcttccggcgtcattttctcatttcctacctggcggacaatttcgtcgagagtagacgagagttgtgaacccagaaagcaagagaggatggcgggaggagcttcattggctcccaaacgatagctgttgctggcgctcatgatggaggcacgcaataaatcctggtttttataaaccatcattaaggcgtttaccagaaatgtgaggaatagcatattgcctttcggattctttccgggagcgaacagattgataccggtatctgtgcagagtgaccagttgttgtgcttgcccgaaccgtttactccgctatatggcttttcgtgcaggagtacattaaaatgatgcttcctggcgatacgcttcatcaaatccatgacgagctggttgtgatcgttggcaaggttacagttttcgaaaataggggccaactcaaattggttgggagctacttcgttatgacgggttttggcaggaataccgagtttgtgacactcgatttcgagttctttcataaatgcagtgacacgtggagggatagagccgaaataatgatcctccaactgttggtctttggcagaagagtgccccatcagtgtccgtcctgtcaggcagaggtcggggcgtgcattatataaggaggagtctacaaggaaatattcctgttcccatcctaaattggtatatacgcgtgtgatgttcttgtcgaatagctgacagacttccgttgctgctttatctacagcggcaagtgctttcaacaatggagttttgtaatccaacgcttcacctgtataagaaatgaagatagtggggatacaaagagtggtatctactacgaatgccggtgaagaaacatcccaggctgtatatcctcgtgcttcgaaagtgttgcggatgccgccgttagggaaagaagaagcatccggctcttgctggatcagtagttttccggagaagcgttcaatcactccgccatcttcgccgaattcgataaagccgtcatgcttttcggctgttccgtctgtcagaggctggaaccagtgtgtgtagtgagtgacgttgagtgacttagcccaacttttcataccgttagcaattaaatctgctatttcacggctgataggcgtacctttttcgatagcgtcggttacagctttgtaagcttctttgggaagatactcctgcatcttcttgcggtcgaacacgtggctaccataataatcagagagtttgttggaaggggcaataacttccagaggtttccggttggaaagctcttgtaaggcaaaaaaacgcatttttgacataaatggtctatttttttatcggttgatggcgcaaaattatatgttttttctgaaagtacccctattttagagggggtattttgaaaaataatgtgtttttctaaaagtaccccctctgttgattctccaacttctattcttattgttgctgttcgttgatttctttagccatctgtttaaccaaactttccacttggatataatggttgtgatagttcttgaataacagtttgaacactgggctgttcacagccatttgggtaagaaattgtaggtgtttacccatagaggtgttcatctgcatacgctcttttttgctcaagttgtcttgtagggagtaaacaccgcatgaaatttggatttctgcaatgccttcatcccaaggatgggtgttgaggtgagtcaatgctgccaggatttttttcaggtctttcagcagaatgtttaaaagttcgaattcggtgcggtttatggagcaggaatccgggttcaggaggaaagcgaatttaaggtagaaatcctttaattcttctttaggaataacaaatgaatctttggaagcctttatcatgcctcccaccgctggttgaacggtaacttgttttgtttccataatataattatgaataaggtggtaggcgaagattttctatgaaataagagcggttccgcctttcccgttactcttcaccaaccaggcagtgggtgcattaacactccacacgggggtacgaaaccgccatatgaagcatcaggacaggcataaaaatgcctgccacgaaacgaggcaggttccctgcctggttgatatgaagagtatcgcaaagatacgacaattttcttctttgtcaagaataaagtgataaataaaaagatagaagggttgatttagtcattaatatgttttcagggggctcttatatttacagatattggaactttgtatttttcccattattgttgaaatccccttcatattataacttcttccatacaggttttattaattcctctttcaacctatcaccgctctgtaagtgcgatgaataaagagttttagaaaggtggtgataggttgaaagaggattttcgttttttatatatgaagagaatagcagaatatgcagagcttcctgcatttatttcgagacaaccgcgccaaagatttagttcatctccatgttattttgaataatgtgaaggttttcttctgataactctttttagtgtccaacttctcttgcttttcgatattcttttttatatttgcctacgttaatgaaggagatacgacgattgagagataaaatattgataggatgcatattgtgtctgttctcttttataccaaaggggacagccaataattatataatgaatccttatacccatcaggaaatctctgctgactccattatagaacgtgtgatgacttttgcacctttgtatgaaacgatagtcagtgattatcgcgcgaacctatatataaaaggtaagatggacattcagaagaagaattttattctccgttatgtaccttctatgtttcgtttgcaaaagggtgttcgcgaatatctgcttgaaacatatagtgatcttcattatacggctcccaatatttacgatcagaaagtaaaggcttcccagggaactgtgagaggaaataggggattgcctggattgctcgagtactttaatgtaaatatctactcttcttctttattgaatgatgaacgcttattgtcaccactggccaaaaacggacagaaatattataaataccggatagacagcgtgatgggagatcctaacaatctggattatcgggttcgctttatcccccgcactaagagcgatcagttggtgggtggctatatggtggtcagcagtaacgtttggagtgttcgtgaaattcgtttttcgggaagatcggagctgataacatttacctgttggattcagatgggagatgtaggcaagaaaaatgaattcctgccggtgcgttatgacgtagaagctcttttcaaatttctcggaaataaggtggatggtaattacaccgcttctttagattataaatccatcgaactgaaagaaaaaaaggtgcgcaagaaagagaagagaaaatataatctttcggaatctttctctttacagtgtgatacgaacgcttataagacggacgcctctacctttgctatcatgcggccgattcctttgaatgaaagtgagaaaaaactatatcatgactatacgcttagacgtgacacgacaacggtagaaaagccgtccaagagtcaggccttttggggaacgatgggtgatttgatggtagaagattataaattcaatttgtccaatatcggaagtgtgcgattttctccgtttatcaatccgctcttattcagttatagtggaagcaacggtttgtcttatcgacaggattttcgttataaccgtcttttcagaggggataaattacttcgcattgtgcctaaactcggatacaactttacgcgtaaggaattctactggtcattgaatgccgattttgaatactggccgcagaagcggggattcttccggttgaatgtgggtaacggtaaccgtatttatagtagtaaagtgctggacgaactgaaagctatgccggacagtatcttcaatttcgatttaattcatctcgattatttcaaggacttgtattttaacttccgtcataccgttgaagtagtcaacggactggatatcggtctggggttctcggcccataaaagaacagcggtagagccttcccgctttgtaatcactggcgattatccgatgccgcccccggaatttatggataaattcaagaacacttatatcagtttcgctccccgcatccggatagagtggactccgggactctattattatatgaacggaaagcgaaagattaacctccattctttatacccgactttctcggtcgattatgaacgaggtattaaaggagtgttcaagagtacgggtgaatatgaaagaatagagtttgaccttcagcatcaaatccggttgggattgatgcgtaatatttattatcgtttcggattcggagcattcaccaatcaggatgagttgtattttgtggactttgccaatttctcccgccataatcttcccgtaggttggaatgatgaaatcggcggagtatttcaggtgcttgactcacgttggtataattcctcccgccgttatgtacgggggcatttcacctacgaagctccgttccttattctccggcatctgatgaagtacacccgttatgtgcagaatgaacgtatttatatcagtgccctctctatgccgcaccttcaaccttatctggaagtaggatatggcatcggtacgcatatttttgacgtaggagtttttgtgagcagcgaaaattggaaattcggaggaataggctgtaagttcacgtttgagttgttcaaccgatagttttcttcgttccggttgttttatcgaaagattttacttatctttgtataagagaggatgagggcaaaatttagcatcaaagaggtgtagtcgcctcataagcacaggtattttcctagaaaataaattctaaggtataaatacctaaatttattttagtaataactcatcctctcttctctcttttttatatgcatatacaaaatggacggaattttaataacgatcattgttatcaccgctttcctggtttataagatgatttcctcaagcaggaaacaggaggggtataaaagatggaaagcaacaagcagtggtaaggaagaaaagactactaaggtaaaatgggaacacggagcctggcttaggcatgctttggggggaactgttccgagagcgcagtatgttcaaaagtttgatgaatcggctgttgtttggtgtgccaacttgttgggagtggaaacggcacggttgaaggaaattctacgggatgtttccgaacattaccgggagttctggatgagaaaaagaaagggaggttatcggatgatttctgctcctgacaaagaattacaatctattcaaaccactattaattctcgaatattatcatctgtgacaatgattcatccggcggcagtaggtttccggagcggtcattctgtggttgataatgccagtccccatctgggaaaacggtatatcttgaaaatggatattcatgattttttcttttcgatacggagccggagggtgaaaaagacatttgagaagattggttatccggaaaatgtgtctaaagtattgggagtgttgtgctgcttgtacaggcacttgccgcagggagcacctacaagtccggcgttaagcaatatcgtggggtatgagatggacaagaaattggctgcactggcagcggaatacggactgacttatacccgctatgccgacgacctgactttttcgggagatgtgttctccaaagaacaaatcattccccggatcaaacagatcatccgtgatgagaaattcgaaccgaatcataagaagacccgttttatcaatgagtatggcaggaagattattacaggagtatctgtttcttccggtgcgaaactgacaatccctaaagccagaaagagagagatccggaagaatgtctattttatcctgacgaaaggcttggcggaacatcagtgccagattggctcgagtgatcctgtttatctgaaacggctgattggagaactttgttattggcggtcaatagaaccggacaatgcgtatgtatccgattctattaaccgtttgaaatgtttggagaaagggtattaatctaattggcaatcgttacccgttcattttctatcttggcgtaattccttttcacagcttcgcgaatacctctttgcatggcagcgtctatgttcgatcccatacgggcaaagccgaactgttgtgcgcatgcttttatcaaatctgccgcaggcaggctgatggagtcggtcaatagttgccggatggcattggctatttcttcaggtggtatgtctgtcgcttcccggtcggaaaccgggcgatagattgaataggaagcgcattgctctttgtcgttccagcagaagacaagtccttcgtattctgtgcgatagatattcaatgtgtcgagtgctgtttctatctgtgcctctacccgtgttcccaagcggctgattccccattcggacaggattttcttacagagcagggatttactgattggcgcctcgctttccataatcttccgtatttgggagaggaggatagcgtaactgtccgtaaagaaaaagtcttccggtgaataactgtatggggtgatctttgcaaacttgtacttttgttctatccggttttgagtagaaagaacggaagctgcttgcttttcaggagcaacaggcgatgccttgagtacaaatgaaatttcattgttggttatctgtgccgtcggtgcaggtgctgccacttctgtcggagtagaattgatttcggctgctgtcattgaaccgacctttgaattctttttccgggcgatagcctcttggatagttgccattacttcgtccggcttttcccaccagtccattgtccatatccggtagatgtcccatccgagtgctttcaatacattattctgcacaatttcccggtcacgtgcggtcttggtacgtttgtagtttttgccgtcgcagataatacctaactgatagttagaggtattttcggtgtcgacgatacctatgtctattttgtatccggagcaaccaatgtctgtatgcacggtgtaacccaatgagcgcagtctgtcggcaatgatcgtttcgatggaggctgttgcttccgacagttgtcttggcacactgctgatggtgctccgggttcccttctccgcatattcgaggaaacgttttagtccggctactccaatagaagaagtccggttcaggtcgatcatatccgaccttagggtggaatagataatcatctcataccgggcacgggaaacggctacattcaatcttctttcgccgcctgcccggttcagtggtccgaaattcatgctgacgcgcccttctgcatccgggccatagcccacagagaagagaataacatcgcgttcgtctccctgcacattctccaggttcttgataaataacggttcgtcgcattccagcgcaagagtttccagttcggggtaaaagataaaaaggtcggataataagtcttctatcaaggcttgttggacaatgctgaaagtgactacaccgatacttttctttcttaattcctcgcttctcaatcttctggctatttcgtccaccacagcttgagcttccgcccggttctggcgcgacttgcctttatcatagtaaccgttgatgttgactatcctgactttcgattcaatgttgtccggtgaggggaaagtcatcagtttgttatcgtaatattcggagttgctgaaagcgatgaggctctcatgtttgcttcggtagtgccataataaatatttggaagggatagacagagcgagacagtcgtcaaggatactctccaaatcttccatttcaatgttgtcttcatcaatggtgttgaccgagaagaaactggtaggaggcatttgtttcgggtcgcctacgataatgacgtttttaccccgtgcaatggcgcccaccgcttcataagtaggcatctgtgaggcttcatcaaagacaatcaaatcaaatttatcagcgtccgtatcgatgaattgagcgacggaaagaggactcatcagcatacacgggcacatgcgcgacaacaaagtgggaatttggtcgaatagcttgcgaatagatatgccgcgggcattgttgcggatattcttttgaaggatacccacttcggaactttggatggcttcgtgagtgaaagacggaatgttggaggccaaccgggcaaataattctctttgcgtcgtttcttcgaatttggcggatatttgtttgtatttagcaatgatgtcattgaatatcttaccgttgaataattccagagtcggctctttggcaatgatataccggatagctgcctgatagaaactcttgcggaagctgtctgtaagttggctggtaggaatattcttttctttatattccgtcgcgataaatcctattcccagactatgcagggtttggtaggcttgtagccactgataccagtccttgagcttgtcgaggttctctttccaggttcgggcttttgacaaggcaatcgttatccagtcggctgaatcggtataaagttcttcgatcgagatacccagcatgccggacaatttcttttcggtggctgtgagtgtatctgcgagctgatacagttcattgaaagaatgagcatggatgtctctgaatgtttgaattccttcagtgagttgtgcggacaaattctgcttgatttgcgaaactttggcaatgtcttttgcgtagttcaacaaatgcgaatgaagggaagtcatgtcgtcgattatctgctcaatggtgttccaatcctcgttcttgccggggcgtccgaatagggagggaagttgcccgatgtatttccggacggcttctgcttcttcctgataccggataatgcggtggagcagaggtttgatgtcttctgtttcaatcgtttttaaagcatatacgttgattgcctttctgattttccgttgtccgaaatatctgggaaggaaccattgatcggatacccggttccattcggctaacatctgctttgcgttgatggacaggatttcttgggtgaatccggtttctatctctttcctttgttcatcccgtttccgtccgtgaaccactacttcccggtattcattcagtgtttcgttgagcaatggcaaagtcagcaatccgggagtcagttccggaatgtcgagtattctccggatgatgtgggagattgtctggaaatccttgcgtgtagggtgtatatccgtatcttttagaagtatggagaatacatccagcttctgccggatggtggtcaacaggtcgataaatccggtgagcagttgggaggacccctccttaacggctgatgaatattcggtaatcgagataccggttaatggatgctggtaaggatgtccacacgcattggccgtccggactagcagctcgatggcatcttcccattgggcaaatgtgtctttatctaatgtatccagataagcttgtggaatatcaaaacaagattcgacgtccacggattgataatgaataatggcgtcgtataatgaaaccccgaacgggtattctttatgcagggcttcgatatattgattcaattccgcccgtaaattcagcaggcgttccgcttcctttctgaattcttcgggaggtgtctgcctgataatttccgtagtttctttcagttgcgagataacggcggatttctttgttttgttggaatgaatttccagacagaacggagccagcccgatagctgccaatctgttttgcacaacggagagggcagccatcttttccgctacaaataagacacgttttcctttgtaaagcgcgttggcgatgatattggtaatcgtttgcgattttcctgttcccggagggccgtgcaggatgaaagtcttgtcgtgtacggcttcgtagatagcttccagctgcgaagaatcggcgatgatgggtaatacaatgtctgcgggcgacacttgtttgtccatatccgttgcatctatttcctctgtggcggcttcccattctatctttccgttgatgaggctggacacaatcttgttctgaaccagtttgttggcattgttgtgaatatcattccacatgatgaacttgttgaaagagaagatacccagaatcgcttgctcttccacgtcccatttacgctggttcttaatgctgttgcggataatggaatagatcagcttgacgtttacgccgctttcgtcggtaggtaacgggtccaatcctgatagggtgattccgaagttttggcgaagcatttccaataaggtgatattcatcatcgtttcttcttcccgggaacggattacgtaacctttggctgccgatttacggataatttcaaccggtaatagcaggatgggagcgtagcgggggcgttcgctggaaggtgtctcgtaccatttcaaaagtccgagagccagatagagcgtgttggctccattctcttcgatagaagtacgcgaagagcggtataggtgagtcagtgccttgcctaaatcgttttcgggcagatagaaacgtaaccttttctgtgaaagttccgagttgatgaaaccaaccatgggatcagattccggtatggaggaataaatcccgaagtccatcgccggactttcccaatcggcagggcggtgaaggatgcggaattcttctccgtcggccaatgcatcttccagacaggatagattagccgggatgagttggagcgtgtttttggtaatccggatattcagcagattgttgcgcaggcttaaatccagcaaccgtctttcccataacagttgtttggtgattacggtctgggtctcgttgcccgataaatcatacggattgatactttgcggagtggcatgaacggcacttctttgaatgtcggtctccttttcttctacttcccatacctgcccgtgcagaatgcgttgggggatggggcggatgcccgaatgtctcgctcttttcacatctatggcaagaatgaaactgttcccatccgtcagctttccgttcgctttcttcactgcatcgtcgaaatcggacgaatgtcccatgttcatgcaggtcgtttcaactaaagtaatgtcgtatattccttcggctgtccgtttggttaacagggaaacatcgtcaatggtaggatccggaaaagtttccggcactagccaggctcccgcaaaagcatgcccttgagtgatgataatgagtgcattcagcccgattgcttccagacaggaagcatagagcaaagccatatccagacaggttcccagtttttgtgccatcacggagtcggctagccgtacacgttgcccatattcctcaaagctggcggggatggtgctgtatataatctgttgttccgtgatagccgtgtagatggcggccatctgtttccttacccggtccggagtgcggctctgatattcgtcaagggacggattatcagtccattgtcccaggatggaagcggctctcttgatgatcggcacaatggctgtatgattgggggtgatgaaagcggccagcatttcgggcaatacattaagccctccccattggtcgtatgccagaatgtcgatagggtaggtttggcagaatacggattctgcttcggaagtaatttcaattttcagattgccggataaacgttcggtcagctgtgtgaaatagttggcggacaaagtgagattgaatgacgacaggcatatcgattcattgggcggaatttgtgccacagctatcggagcagcgtttccgaaagtcggttctgtcgtgatttgtacctgaatgtccttcagcggggcaggcgttgtattctcaatagaaagctgatgaatgattgatgcaccgttttgttgtatcgcaaaattaataagcggtaaatagtcgcattgcaccttgactttgtccaatctctcgtccatggcaaaaactgtataaattaaagattgcaatattacaaaaaatacggatataattctcttttcttctgccattcttttgtcaatcaagaaaatattcctacctttgcgcccgatttatagataatataatgtcttatttaattaaagtattaaacaatttatttattaatggaaaacttaaagaacgtagctcctattgaagatttcaactgggatgcttatgaaaatggcgaaacagtaaccaacgttagccacgatgaattggaaaaagcttacgacggtacgcttaacaaagtgaacgaccgtgaggttgttgacggaaccgtaatcgcaatgaacaagcgtgaagtagttgtgaacatcggttacaaatcagacggtatcatcccattgaatgagttccgttacaatccggatctgaagatcggtgatacagtagaagtatacatcgaaaatcaggaagacaaaaaaggacagctcgttctgtcacacagaaaagctcgcgctactcgttcttgggatcgcgttaacgctgctctggaaaatgaagaaattatcaagggttacatcaagtgccgcactaagggtggtatgatcgtagacgtattcggaatcgaagcattcttgccgggttctcagatcgacgttaaaccgatccgcgactatgatgtattcgttggcaaaacaatggaattcaaagtggttaaaatcaaccaggaattcaaaaacgttgttgtatctcacaaggctcttatcgaagctgaactggaacaacagaagaaagaaattatcggtaaactcgaaaaaggacaagttcttgaaggaactgttaaaaatatcacctcttacggtgtattcatcgaccttggtggcgtagacggtttgatccacatcactgacctttcttggggacgtgttagcgatccgaaagaagtggttgagctggatcagaaactcaacgttgttatccttgacttcgatgacgaaaagaaacgtatcgctctcggcttgaaacaactgactccgcacccatgggatgcgcttgatactgacttgaaggttggtgacaaggtgaaaggtaaagtggttgttatggctgactacggtgcattcatcgaaatcgctccgggcgtagaaggtttgatccacgtttcagaaatgtcttggagccaacacctgcgttctgcacaagatttcatgaaggtaggcgacgaagtagaagctgttgtgctgacacttgaccgcgaagaacgtaagatgtctttgggtatcaaacaactgaaacaagatccatgggaaactatcgaagaaaagtatcctgtaggttctaagcatactgcaaaagtacgtaacttcactaacttcggtgtattcgtagaaatcgaagaaggtgttgacggcttgatccacatctctgacctttcttggactaagaaagtaaaacacccatcagaatttactcagattggtgctgacatcgaagttcaggtattggaaatcgacaaagaaaaccgtcgtttgagccttggccacaaacaactcgaagaaaatccttgggatgtattcgaaactgtgttcactgtaggttctgtacacgaaggtacaatcatcgaaatgttggataagggtgctgttgtagctcttccttacggtgtagaaggtttcgcaactccgaaacaccttgtaaaagaagacggttcacaagcacagttggatgagaaacttgaattcaaagtgatcgagttcaacaaagacgctaagagaatcatcctgtctcacagccgtatcttcgaagatgtagctaaggctgaagaaagagcagaaaagaaagctgcttctggtgctaagaagtcatcttctagcaacaagagagaagattctccgatgatccagaaccaagctgcttcaactacgctgggcgatatcgacgctcttgctgcattgaaagaacagttggaaggaaagaaataatctgaatagaatattttccaatgaaaggcgctcccgtttgggggcgctttttttattcaccacagatttaagaaatgaagataagagggaatttaattcagacataagaacaaaagaataaaaaataaaatagcagttcaataagcaacagaaataattttcaaagcgctgcctttatgttcttttgttcttatgtctaaaaataaattatcaaaatctgtattaatctgtgtaaccctggggtgaaatatttccttttcctttgcaagattaaatgtgaaatgtcctatctttgcatatcatggaaaaatttgagttacatatattgggatgcggttccgctttgcctactacgcgacattttgcgacctctcaagtcgtaaacttgcgtgaaaaactatttatgattgattgtggcgagggagcacagatgcaattacgccgctcgcgactgaaattttcccgattaaatcatatcttcatctctcatctacatggtgaccattgtttcggattgttgggactgatctctacattcggattattagggagaactgctgatttacatattcattctccaagaggactggaagagttgtttgcgccgatgcttgctttcttttgcaagactttgacttataaggtgttcttccatgaattcgaaacgaaagaaccgatgctcatttacgatgaccgttcggtgactgtaaccacaatccctttaaaacatcgaattccctgttgtggtttcctttttgaagagaaacagcgtcctaatcatatcatcagagacatggtagacttttataaagtcccggtctatgaactgaaccgcatcaagaacggagcggattttgtaactcccgagggagaagtaatacccaatttacgtttaacccgcccttcggctccggcgcgtaaatatgcttattgttccgatacaatctatcgtccgtcccttgctgaacaaattaaaaatgtagatttgcttttccatgaggccacctttgcacagaccgagcaggcacgcgctaaggaaacttatcataccactgctgcacaagccgcgcaactagctttggacgccaatgtgaaacaattggtgatcggacacttttcagcccgttatgaagatgaatctgttttacttcatgaagcgtccgccatttttccacaaaccattttagcgaaagaaaatttgtgtattgacgttgatggaggaactgtctatgaaaagtagtcgactgctttggggagtaatcatcctgctctttggttgcctggcagcctgtaaaaaagagaaacctcaatctccgataccggattctttgtcttccctccaggaactgttctatcctgcttatcaaataaatgcagacagcattcatcagatgattcgtattggcctgaacgaaaatccggtaactccctgggattcggttttgctggcacattatcaggaaaaggatgaattcttttggctgaacgattctctcatatccgataaacctgccgtacaggtggcagactcgatgttattctggttaggaaacatttcacaacatggagttaatccgaatctgtatcctgtcgatagcatccgtgaggaattgcaacagatacgaaccttgaaactgcgtgaagggaaaacgatgaaccgtctgctggcagacgtggagtatcagttaacagccgcctatctttcgtatgtgtgtcaattgaaattcggattcttgcctccggagcgcagatggaatgattcgatcgaccacattcctttaaaacaatgtgacgtgaagtttgcaatggccgctctcgactctttgcgtgcaaatcctaacgccgcttttcaccgggcgcaacccgcttccccgctttatcataagatgcaggaagagctggttcgtgtgaatggctggggagtgacagatactacggattattatcgcgaccgcctattggtaaacatggagcgggcacgttggcaatatgcattggataaaggacgaaaatatgtgatagctagtgtggcggcatttatgttgcaagccgtcaacgaagaaacagactctatcttggagatgcgtatttgtgtagggactgtgaagaataaaactcctctattgtcaagcaggatttattatatggaactgaatccttactggaatgtgcctcaaagcataattcggaaagagatcattcctacttaccgcagagatacgacgtattttacccgtaaccgcatgaaggtatacgataagaatggactccaggtagatccccacagtattaaatgggcgaagtatgcaggaagtggcgtaccttatacggtgaagcaggacaataaaacagggaactccttgggacgtatcatcttccgttttcccaatcctcattccgtatatctgcatgacactccgtcacggtgggcttttacacggaataatcgtgcggtgagccacggttgcgtccgtcttcaaaaagcactcgacttcgcgttcttcctgttgaaagagccggatgaattgttggaagaccgtattcgtattgcaatggatatcaagccggtgagtgaagagggaaagaagctgcccatcagtgcggcttatcgtgaattgaaacattatagtttggaacagtatatacctttatttatagattatcagacagtttatctgtctaccgataataatttgaggtattgtgaggacatttataaatatgatccgtccttactagaagcgatgaataacctgaatttgaaaccataaataaacatacagatacgagagattatgatcccttataacgaacgcgaagttctgaaactccttcaggaggagagtacacagcggaaaggatttgaaatgattgtggggcagtatagcgagcaattgtattggcaaatccgccggatggtactgtcgcatgaggatgcgaacgatctcctgcaaaacactttcatcaaggcatggacgaatatcgattatttccgtgccgaggcgaagctgtcgacctggctctatcgcatcgcgctgaatgagtgtcttacctttctgaataagcagcgtgccatgactaccgtggatattgacgatcccgaagcagtagttgtgcaaaagctggaaagtgacgcctatttctcgggcgacaagatacagatgtgcttgcaaaaagccttgcagactttgcccgaaaagcagcgtatggtgttcaacctgaaatactatcaggaaatgaagtacgaagagatgtcggaaatcttcggcacgtcggtcggtgcactgaaagcatcttatcatcatgcggtgaagaaaattgagaagtttttagaagaaatagattaaaccttttaaatgagacactgtctaatgaaaagagaggagaaaaacgtatgaaagaagaagatattttattgaagaagcttggaaaggaaaattccttcaaagtgcccgatggttactttgagaacctgacttcggaggtaatgaataaacttcctgaaaaagagaaagttgcttttaaggaagaacctgtcagcacatggacaagactgaaaccattgctctatatggcagctatgtttgtaggggcggccttgattatccgggtggcgtcaacagaccataaacctgttacagcggatgatgtagcggtgacagaagtggatactgaagtagtcgtatctgacgaaatgattgatgtagcagtggatcgtgccatgctcgatgattattcgttatatgtttatttgagtgacgcaagtgtagaatgatttataaaaactgattgaatacagaaaatgagaaaacttatcgcattggtcgttttgttatgtggctttatgcctgttctttgggctgctgatggatgtgatcagcatttatcacgggaggagttcagggcaaaacaaaaagctttcattatcgaacaggctggattgaataaagaagaagcagccaagttctttcccgtttattttgaactccaggataaaaagaagaaactgaatgatgagtcatgggatttgatgcgcaaaggcaaggatgataaaacaacggaagctcaatatgcagaaatcaacgagaaagtagccaacaaccgtattgctgccgaccagcttgataaaacttatttgggtaagtttaaaaagattctttcaagcaagaagatttttctcgtgcaacgtgcagagatgcgttttcaccgcgaaatgataaaaggtatgaatcgtagcaaagacaagggagacgattcaaagaagaaataaagaaaacagagcgtccgattcgtatgaacagacgctctgtttgagtaaaatggaggctctgtccggtgggaatagagcctctgtttttttatgccggtaaggaagttacagtccttttttctttgcttcattccaaatggcatccatctcttcgagagacatatctttcagactttttccttccttgatggtgtgctcttccagataattgaaacggcggataaacttctggttggtaagttctagtgcattatcgggattgattttataaaggcgtgccgcattgattaggctgaacatcacgtcgccgaattcagcttccgctttctctctatccatgttggccacttcctcctgaaattcacctatttcttctttcactttatcccaaacctgttcccgttcttcccagtcgaagcctacattgcgagctttgtcctgaatacggtaagccttgataagcgagggcagggcagcgggcacaccgcttaatacacttttgtttccatctttctctttgagtttcaactgttcccaattctcggaaacttgtccggctgtctctgctttcacctctccaaacacatgcggatggcggaaaatcagcttatcgcacaacttgtcgcaaacatctttgatgtcaaaatctcctgtttccgagcctatcttggcatagaaagcgacgtgcaataatacgtctcccaattctttgcagatttctttcttgtcatccctcatcagggcatcgcaaagttcgtaagtctcttctatggtgttgggacgcagactttcattcgtctgtttacggtcccagggacatttaacacgcagttcgtcgagaatgtccaggaagcgtccaaaggcttccatctgttcttgtctggtatgtgacataaatctatctatttaattcatttttttccattcctggtaagaaatcaataaccctactacttccgagtagttctggcggccactttctatcttgtttcctttcaggtaaagatcgtatatccaatcctgtacggctcccactaccgggctatacttggcagcccaataggcttgattattcttggctaattcaataatttccggtcggatgcgttgaaagagttttgcatattcttcttctgaaagtaatctttttgcattccccagtacatgccccagtacagagaaatatccggagaaacggatacccattgcctgtgaacgggtacaaacctgataggcatagaaattggcttccgcttcgctggtgatacctaacaagtgggctagttcatgagcataagtggcggggtagttagcgggaagcaaatctccgttaagggtgaattcgcagaagaaaggccccatgctaccggttactcctaccatggaaatgaacggagtaaacaacatggtctttactctcggatgatcgtgtggaggtcggtgcacgcccaagctatcacttaactgattatagattcgtacggtttcttcctgtatcaaatcctggttgatactatttacaggggtgtacgaacgatttaattgggtgatatagtcgtcaacgaactcctgaaaattttcgggagtgtaggctgtatatgggatttcggttcgttggtaaaagttcttttgagaataattcagtccccaagccagatagaaccatacataaatccacaacagatattcgccgtcacgcaataaaattttcttccaagacaactttttgcggagacgggcataaataggataaataatcacacccgcgatactaaggaagataaataagtctcctatcgcaaaaggaaataaattggaaaaaaacgacaaaacgtaagagataaaaggatagattgtttgcgaatagattgttgccagagcaggaatccattgcgttagccacactaggattaagattgctcctaaggctaaatatcttacatttggcttctttttcatcatttgtttaatatcagtcaacaaaaatatgcattaaatagacgtcgcgcgaaaaaatacctctatatttgcaaaaaatctgttaacaatggctttataacttgtataatagggaaagtcattcaacataaaccggataaaagatggctacatcagaagaaattgaaaagtattgccggaattgcgtatcacgtgatttcgtgaatggtaaaggtcttgtttgtaagcgcaccagagaacttcctgcttttgaagaagaatgtgaaagttttgagaaagatgaagagctggaaagattagcccctcccaagccggaagacttcccggtatctatgacagaagaagaaatgcttgccgaagagaatctttccaaaggagtactgtacgcagtcgctgcctgtattgtgggtgcggtggcatggggactgatatctgtttctacgggtcgtcagattggatttatgcccattgctatcggatttatggttggctttgccatgcggaaagggaaaggaatacgtcccattttcggaattatcggtgcggcattatccctgattagttgtgtcctgggtgatttcttttccattatcgggtatatttcccaggattatgatatgtcctatttcgacgttctggtaagtgtggactatggagaaatattctctattatgctggaaaatgtgatgtcaatgactgctttattctacggattcgctctttatgaggggtataaattctctttccgtgcacagaaacaccccgagggtggtaagatttgaatttaaattattaattttgcacccgttatttttagaatatacattatcatatatacataaaacaatatggaattagcaagtaagtacaatcccgctgacgtggagggaaaatggtaccagtattggctggaccatcatttattcagttcgaaacccgatggccgtgaaccttacaccatcgtcattccgcccccgaacgtcaccggtgtgttgcacatgggacacatgcttaataataccattcaggatattttagttcgtcgtgcccgtatggaaggcaagaatgcctgctgggtaccgggaactgaccatgcttctattgctactgaagctaaagtagtaaacaaacttgctgctcaaggcatcaagaaaaccgacctgactcgtgacgaattcctgaaacatgcttgggattggacagacgaacacggaggtatcatcctgaaacaacttcgtaaactcggtgcatcctgcgactgggatcgtactgctttcactatggacgagaaacgcagtgaaagtgtactgaaagttttcgtagacctgttcaataaaggattgatctaccgtggtgtccgtatggtaaactgggacccgaaggcattgaccgctctttctgacgaggaagtgatctacaaagaagagcacggaaaactatattacctccgctataaagtagaaggtgatccggaaggacgctatgccgtagtggcaactacccgccctgaaacaatcatgggtgacacagcgatgtgtatcaacccgaacgacccgaaaaacgaatggctgaaaggtaagaaagtgatcgttccgctggtaaaccgcgccatccctgtgattgaagatgattatgtagacatcgaatttggtacaggttgcctgaaagtgactcctgctcatgacgtaaacgactatatgctgggtgaaaagtacaacctgcctagcattgatatcttcaacgataacggtacattgagcgaagctgccggtatgtatatcggcatggatcgtttcgatgttcgtatacagatagagaaagacctcgaagctgccggactgctggacaagacagaagcctatacaaataaggtaggttactcggaacgtaccaacgtagtgatcgaaccgaaactatctatgcaatggttcctcaagatgcagcattttgcagacatggcattgcctccggtaatgaacgatgaactgaagttctatcctgcaaaatacaagaatacctaccgtcactggatggagaacatcaaagactggtgtatcagccgtcagttgtggtggggacatcgcattcctgcttatttccttccggagggcggttatgtggtagctgctacagcagaagaagcattggcaaaagcgaaggagaaaaccggcaatgccgccttgacaatcgaagatctccgtcaggacgaagattgtctggatacctggttctcttcctggttgtggcctatctctttgttcgacggaatcaacaatccgggtaacgaagaaatcaactattactatccgaccagcgaccttgtgacaggaccggatattatcttcttctgggtagcccgtatgattatggcaggctacgagtacgaaggacagatgccgtttaagaacgtttacttcacagggatcgttcgtgataaactgggacgtaaaatgtccaagtcactcggtaattctcccgacccgttggagttgatcgagaaatacggagccgatggagtacgtatgggtatgatgctttctgctcctgccggaaacgatattcttttcgatgacgcactttgcgaacagggacgtaacttctgcaacaagatatggaatgctttccgtctgattaagggctggacaaatgccaaaggtactattgagatccctaccgatgcacatctggcagttcagtggtttgaccaaagactggatgcggcagctgttgaagtggccgatctcttctccaaatatcgtttgagcgaagcgttgatgctggtttacaaactgttctgggatgaattctcttcttggctgttggaaatcgtgaaacctgcttatggacagcctgttaatggctttatttatagtatggttcttagctctttcgagcgtctgcttgaattgctgcatccttttatgccatttatcacagaagaattgtggcaacaactgcgtgagcgtgaaccgggtgaaagtttgatggttactcaactgtttgaaccggtcggagcaaatgaacaattcctggcagagtttgaagtagctaaggaaatcatcagtaatgtccgtagcatccgtttgcagaaaaacattgctctgaaagaagaactcgaattgcaggttgtaggcactcatccggtagagaaattgaatccggtgattatcaagatgtgtaacctgtcttccgtaacagtggtagaaagcaaatcagaaggtgcttcttctttcatgataggaacgaccgaatttgccgtgccattgggtaatatgattgacgtggaagccgaaatcgcccgtatggaagccgaattgaagcataaagaaggattcttgcagggagtgatgaagaaacttagcaacgagaaattcgtcaataatgctccggctgccgttcttgaactggaacgtaagaagcaagccgatgcagagagcatcattaattctttgaaagaaagtattgcggctttgaagaaatcataatcctttgatacttaattttatataataaagggcatctcaattcgttttgggatgccttttttttgcactaaagaaattaatactatctttgcttccgctatttatagaataccacaaatgaaacaatcgttacggatcattccattcctccttggattattcctttttattgaaggattcttatcacctgcgtcagcccgaaccgaaaatacaaataaagaagtactggttttaaactcgattaatttcaatctgccttgggctaaaaacttttattggtgtcttcatgatgctcttcagaaacaaggagtttctgtgaaggcggaatcgctttccgtacctgctctggtgaatgagatggaggcgaatgccgtagtcacccatttgcgtcagaagtatccggagcctcccactgctatcgtgatgattggagatccgggatggattgtttgccgcgaattatttgatgatgtatggaaagaagttccggtaatcgtgacaaatgcccgcgaccatttacctgcttctcttgaggtcttattatctcatgccccgttgacggaagccaatacagtttccggcgatgaatggaggcggggatataatataactatcttgaagcaatattattatgtaaaggagacaatcgatttaatttataaactgatacctgatatggaacgtctggcgtttatctccgacgataggtatatcagtgaagaaactcgcggagatgtaaaggaagctgtagaagagaacttcccggacttgaatctggatttactttccaccactcaattatctacagaaatgttgttggatactttacgttgttataaaccgaatacgggaatcatttattattcttggtttgagtcgcataacaaaaatgataataactatctttttgatcatattcaggaagtgattgtcaattttactccatctccattgtttttactttctcccgaagacttgtcgaataatacttttgcaggaggatattacgtttcgacggaatcgttctgtaaatctttgctggaaatacttggtcgtgtcttggatggagaacaggcacgtgatattcccggtggggcgggaggagaaggaagtgccaatctctgctatcaagtgttgaaatcctacaatataccttcttcccgctatccagacgatgcggtttatgtcaatgagcccaagactttttttcaacagtattacattcaaatactttcctgttcattctttttgttgattttgattgttgctatcatatattatatcagcattcttcggaaagcatatagtcgcctgcatgaagcaatggaaaaagcggaacaggccaatcaattgaaatccgcctttctggctaatatgagtcatgagatacgtacccccttgaatgccattgtaggattctccaatatgcttcctcatgtagaaaaccgtgaagaaatgtccgaatatgtagaactcattggaacaaatacggatttgttgctccagttgattaatgatattctggatttgtcgaagattgaagccggtacattcgatttctatcctgccttgattgatgtgaaccagacgcttgaagaaatcgagcaaagtatgcagctacgtcttcggcacaataatgtgactttcacatttgcggagagactgtcccaatgtacattgtatacggataagaaccgtttgattcagctgcttgccaattttgcagttaacgccatcaaatttacagaggtgggtactatccgtatgggatatcgtttgcttgatcctgaaacgatttatttttatgtgtcggatacaggctgtggaatgtcttctgaacagtgtattcatgtcttcgaacggtttgtgaagtacaattcctttgtgcaaggtaccggactgggactttctatctgccatacgattgtagaccgcttgggagggaaaataggagtggagtcgaaagagaacaaaggatctactttctggtttaccttaccttatcggcagaattaatgctttacttctttccaatctatcagtagataagttgctatactcttattgcaaacttcctttcccttattggataagttgtctttgaccaagaagaaactataaacgcaagttctgattgtataattgcaagttgcatttatataaccggaacttgcagttgtataaatgaagcttgcaattatagttttctcgtagccaaaaagaagtttggcagtaggggaatgcaagtttacctctaatacaacggaagttatctattagtactttaatagacagatagtaatagataagaaaatagatggttggtttgttttaaggaaatagaatcggtagtaataatggcagataatcctttaaatctacgcgtagttgctttaatgcttgttgaatacggtaatctactgttttgggagatattcccagaatttccgctatttctttataactcatatcccggaacctatgcatcacaaaagcttcccgataactttccggcaatgtggcgatggcatccttgatgcgttgtgtcaactcttcaacttgataaagatccgtatcttgcagcatctcctgcatctcttcataaaatcgagtgtcggcacgttgggtggcatcaatatgtgcaagcttgttcagagctttgcggtatatcattttaaagaggtatgaactaagtgaagtttcgataatcagattttctctgttttcccaaatccataaaagagagtcctgcacaatttcttccgcatcttccagatctacaaaacgatgaccataagcacacagtgtcggataatacctccgaaacagtgcgtcgaatgccttttggtctccctgttgtatggcagatagtaaataattgttttctaacaggtgaatttctttcatgtattagtttgatatttcactgcaaatatagcttttttataagaaaacaaagattttatgaaaaaaaatgagatttggtttaggaaacccacaagtctcccttgtcttatagtaaaaggcaataaaataagaatatggataaaactgattataatagaatagaagaactgcttccccgttattgtgagggactggcaacagaagaagagcgtctgcaagttgaggcgtggatggatgaatcggaagaaaaccgacggatagccaaacagatacatactctctatcttgccacagatactgttcatatcatgacgaaagccgacacagagaaagcattgacaaaggtgaaaagtagaatgtcgggtaacagacaaaggaaaacgatgtggtgggaatggacacaacgtgcggcagcagttttgttcatcccgcttctcgttactctgatggtacaacattggggaggaagcgaacaggaattggcacaaatgatggaagtgaaaacaaatcccggaatgatgacttctctgacattgcccgatggcacattggttttcctgaattccgaatcgaccttgagttatccctcacgcttcgatagcgacacgagaaatgtaacattgcagggagaggcttattttgaagtagccaagaacccggaaaagaagttcatagtttctacttcccaccaatcacagatcgaagtactgggaactcattttaatgtagaggcttatgaaaaagaagaccggattgcagcaacattggttgaaggaaagataggttttatttattcatctgacaatggctcgaaaaaggtgctgatggatcccggacagaagctggtctatgatacaagagacagtaaagtgcagctttatgccacctccggtgagtcggaaatagcttggaaagagggaaagattatatttagaaatactcctctcgaagagggattgcgaatgttggagaagcggtataatgtggaattcattattaaaaacgaccgtttgaaaggagactcatttactggcacgtttactaatcaacgccttgagcgtattttggaatatttccagctttcttctcaaatccgttggcgttatcttgattcgccggatattaaagatgaaaagagtagaatagaaatatattgattgaataaccttaaaagcaaaattacaatgaaaggcagacctccttgaataaaaaacatacgggacgatattggcgtatcttcccgtatgaaaattggtaaatctttttgatgcttgtttggcgacaagcttagataaactttttattaactttaagtcattacaaatttatgcaaaattattttagcatccaatttttgtgggtggtaaagtcgctttggctaacctcaaaaaaaatcccattatttatgagactattgattttgttcttagtatgttctatcggactaacttatgcagccgatagttacgctcaaaaggctttaatcagtattgatgtacgtaatcagcgggtggaggacattctaaaagaaattgaagagcagtctgattttgatttcttcttcaataataagcatgtcgatttgaatcgtcgcgtatcagtttctgctgataaaagcaacatttttagtgtgttgaaagaaatcttttccggtactaatgtgaaatattcggtactggacaagaagattatactatctgttgaagcagagtcgccgcagcaggagaaagtgattgtggtcaatggaattgtgactgaccctgctaatgaacctgtcattggtgccagcgtgttggaaaaaggagtaaagggaaatggtactatcaccgatctggatggaaaatttacattgaagattagtgctgaaagtgtggaactggaggtttcatacatcggttttcaaacacaggcaataaaggttgttccgggtaagaaattattaattgtacttaaggaagacacaaaggtcttggatgaggtagtagtggtaggctatggcacacagacaaagaagacactgactggtgctgtttctatgatggatatgaaagatattgaagctactactgtaacgactgtttctcatgctttagctggtaaagcagctggcttgaaagttaatttacagtcagcccaaccgggaggaggttccaaatttcgtattcgtggtgaagcttcaacgggagcaggaaatgaaccattgtttgttattgatggatttccggttagctccggaagctcactagagtccggtaatatctataaagccggtacgatggataatgtattagaatcattaaatccggatgatatagaatctatttcggtcttgaaagatgctgcttctaccgctatttatggagcacgtgcagggcatggtgtgattttgattactaccaagagaggtaaaactggtaagccggctgtctcttattcggcttccggttctgtacagaatattcgtgccaattatgatatgctggatgctgcacagtttatggatatgtataacaaacaaacatacgaaaaatatttggttcagtatggattgggaatttatgagggatatgtaaaatccagtgagacaccgactggttatactcccggttatacgaatgaccaactgaaatatgtgaacggaacggattggttgaaagaagtgactcgtttgggatacatgcagcaacataacctttctattaacggaggatcggaatctatgcgttatatggcttctatcaattatatggatcaggatggagttgtgaaaaacaatggaacaagccgtttctccatgcgattgaactttgactatgaactaagtaagtatgtatctgtaggaataacttccagctactcacagaataaatatgataacgttcctttaggagatggcgagaatgaaaattccggtatcttgactgctgctatccgtgcaaatccagctttacctatttatgatgaaaatggggattattacatcgatccccgccgtgctacaactcccaatccagtttctttgcttgagattacagataaaacgaccaaggaccgtatcatgggatctgcatttattacagttaaaccagtttctggattagaactaaagttaaatttaggggctgatcgtaggtttcagaagcgttccaattatttgccgaaaacgacattggaaggagaacgtaatctgggttcaggttatattagtcaggaagatgctcaagattacttgatggaattaacggctagttattcaaaaacatttaaggaacataatttaaaggtactgggcggatattctttccaaaaatttacgacagaaggcgtttctgccggaaatacggaatttctgattgacggtttctcatatcataatctcggtgcgggaggagctgcaaagccttccgttggctcttgggcttctaaaaacagtttaggttcttattttgcccgtttgaattatatgtatgccaaccgctatttgtttgaagcaacagtgcgtgctgatggggcttcaaattttgaaccggacaatcgctggggatttttcccttctgttgcgttaggatgggtgatgagtgaagaaaagtttatggagaaaacacgttcatggttgtctaatttgaaatggcgtgtctcttatggacaaacaggtaactctagtgtcggtaaccgagtaaaagatgcctatagtgtaggatatagttatgttataggagggacggagaaaaagggggtatatgcttcaaaattgggaaatccgttattgacatgggaaacgaccagtgaattcaatgctggagttgacttaggattcttcaatgaccgtgtccggctgactgccgaatatttcaatcgccgtattactgatttgttggtatccgaaaaaaagttgctctcctataatgaggtgaataagattgcagctaatgcaggtgctacgaaaagccaaggtgtcgaagtaaccttgaataccaccaatatatcaacccgaaattttacatggaattcgacgttaacgttagctcattataatgatcgttgggataaacgtccggttgactggaaacctaattcatacgaaaagaaagatgatcctatccgggcatggtgggcgtatgaatctgaaggtattcttcaagtaggtgagaaggctccggctgcacaggcagaccttcttccgggacaagtcaaaattaaagatcagaacaaggatggcgttattaatgataatgacaaaatatacatggataatggtgatcccaaattaaccttcggctttaataattcgttgcgatataagaatctggattttaccatttatttctatggggaaaccgggcgtaaacgtggcgcgtcttatctggaagactggacacaggctgctcaaggagcgaatgtttctacgtatgtatataattcatttagcagtcagaatattacggctaccgatccctctttcttgtatagtgcttatggttatggtgacttttatgtgaaaaacagttattatatccgttgtggaaatataactttgggatatacattaccattgaagaagaaattcctgcaaagttgccgtatttatgcagatataaacaatccgttcataataactaactggacagggttggatccggaaacggataacggaacctatgcttatccaaatataacttcttacagtttaggtattaacattaagttttaagtcattatgagaaatatattttataaacttttgtttatttgcggtgcattgctgtctttgcatggttgtgcgttggagaatgaaatatacgatgagattaatcctgacatattcccacagtcggcagaagatgttgatgctcttgtgacggccagtgcttataatgttttctgttccgatcaatataatggtatatttgctgttgctacgggatacgtcacgtcttcggatattgtcactgaccaaatggaatgttcttgggaaggttggttgcaaaaatataattcttatgaagcgggttattggtatatagatggtgatgccggtacaatgggcagggcggtctatcagtttgccaatagactttcttctatgatattgacgaaggatcgcattaaggatgtcgatatggaccaagcattgaaaggccggtatacagcggaattggaatgtgggataggtttcttggcctttttactttatgacctttatggaactatcccattgccggatctggaaatattgaagaatccgacagcagataaaaaattgccgagagctacggaagaagaaatgcgtgagtttattgtgaccaatttgactgaagccgccaaggttcttccttattcttatcaatcgtctgaatatggacgtttcacgaaagggctggcgaatacgttgttgcttaaatattatatgcgtataggtgattgggatggagcagtgaagatcggtgaggaattgaccacgaataaagagtacggctacgcattggttgataattactatgatttatttagtttgacaacagaacagaatacagaagtgatttttgctgcacaggcgattgacggttctatggaaaataactggtttgcccatgtacttccgggagactttccaacagcgtccggtgtttcaaaatggaacggtttcaaaatggcatggcctttttatcaatcttatgatccgaaagacaaacgtttggaaagaatctatggcgaatataccagtgatgatggcaaagtacatagttatgagaatgaccggatgaacgggtctatgggagaaaatctgtatttaggggctgttccaatgaaatacagtttggacggtgtgaagggtgaaaacaatcaaacagatctggttatctatcgttatgcagatgttatcacgttatatgcagaggcattggtacgtaaaaataatactgtcagccaaacctctttaaactatttgaacgagatacgggtaaaacatggcggtttgacggcttaccgtatgtcggaggtttctgataccaatgtgtttttggaaaagatgttggaagaacgcggacatgaattttatttcgaaggagtgcggcgtcaggatttgatccgtcacggtaaatttattgagaaagcaatagagaagaatcggtttgctgggcaatcgacagaaaaagttgctacaatggcagagggtaaatataaatatgaactatatcctttacctcttgcacttattacggaaggacagggagtgattaagcagaatcccggttattgattgaggagttattaggatatttaacaaactaaattgaagatatagaatatgagacaatttaaaacaatcatactttttctgtctgtgttggtcttgagtgccgcctgtcagaaagataagtatgaattaaatattccggaggcaggggtaagacttggatttccggttgaaggggcgactttgaatttaaacgacgagtccgttacatcttttacattttcatgggataaagtatgtgagggaggaaactcgctggtttttagttcatctccttatttattgggtgataccgtattgattcatgcgggtgaagccaatgaatatgtaatgagtgtactggatgcggatgtacatttttcagctttaggagttgggggtggaaaaacgggtactatttattggactgtaaagccgaccgataaattgagtgtcgctgcaacagaaattcattcgtttacagttcaacgcatccagacgcaattgattactcctgcggatcaggctacggcaattttgaatgcagatactccggaggaaacgatattgttctcctggcaggtagaaggggaaaatatcgacacagagtatcaactgtgtttcggtatggatagtggaatgaaaagtgatattgtaaaggtagatgccggaaatacaggagaatgttcgttgacacagcagcagttacaggatcttatcactcaattgcctatttctttatttggacagaatactatttactggaatgcagtcaggaagtctgatggtactttcatttcacgtacttctcatgtgttgaaatttacaggtatgttgatctttacggatattcgtggagatgaaaagattacttatcgtgttgctaaagtgaaatattctactggtgaagaagttgtttggctggcagaaaacctgcgtacgactaaataccctgatggaactgacatttctctggctaacggcgattattggaatgctccttctgacatttctgaaggacttcaaaaagcgtatggcaaatactattctataaaaatagtagataaaatagtgtctgacggatggaaaatgccgactttcgaagattataagttgttactcaacgagtctctgcaaacaggtagtgctgacgtgttgaagcatcggacatattggaactggagcgagtctgtacctgataatgctaatgcatggggaattgggttggtgcccggtggttatgttcaatatgtgggagcgaatgaaaaggttatcaattataatcaagcagataataattgttatttgttgactcgtgatctggctgaacaggtagtcttattcagtgattatggtatgagaaccaaagaaatatataatgtgaatgcatggggaggtgctcctgcacgctttatttatattggaaaatagaaacaaaatgtaaagaagtaacatgatgaacttaatgaataaaaatatgatatcttttattacagcagtatcttttatgatgtgtgcttgcactgatacaaccgtaattcctgccggtgattatgatagtatgaaaggttccggcaatggtaactctgatgccgaatgggcagtaagttctattgaacctttagcgaacccggatagagggtatcatttggaatgtcgttattttgcacataatttagtgaatccttttaattctagtgaagaatacccgaaaggtttcgttgatgatcgggaaataacgtatagttcgaaagatggaagtactaaaattgtacaacaatatatttatctgacaggatatgccagaaaggatattgatgaacaaggtctggaaaatgtccaaaaagtatttgacggattaaaggataaaggatataaaactatcttgcgttttgcctataactggtggggagagaatcagtataacagtaactggaaagatgaagaagaggaggaagagtggatatatagacatattgaacagttagcgccagttctacaaaagaatataggtttgattgccgcaatgcaggctggattcttaggacgttggggagaatggcataatacaagtgtcttattaggaccgaatgcccaacgtgtgaaaaatggagtggtaaacaaattgcttgccgccataccggaaccatataatattgaaatgcgctatccgagtcataagaatgctttgactttggataacgaaacgtatcgtacgactcgtttgggatattgcaatgatttctttacggtgggtgaacatgctttggcagcaggaaacgattttgttcctggtagtgaagaatataaccaagtgatgaatgaagcttatcaaatatacattagtggagagatgccttatccggaagaatcggagtggggattatcggatctgattagccgtaccggaacattgcagatatttcgcgatcatcattattctgcgtttgatatcacacagaatgaaaatatcaatgttcattcatggaagaatagttctgttactccaagcgaattgacacgtaatagaattcttttcgatgaaagctatttcgtggaagatggtaaaaatgtagctcgtacgttctatgattttgtacgtgaccatttgggatatcgtattaacgtgaaaaaggtggaactgaatgctgaaaacggtagtctggcttataaaatagatttgactaatacaggttttgccactgtgataaatccgaaagaagtttatttggttttgatttcagaagatagtaatgaagtcaaggaactgaagaaactggaggttgatccgagagactggcaaccatatgatgtagcgagaaatgattataaagtgctgacgcatacgcttgagggtactgttgaagtgacaggtatttccggcaaatataaagtaggtatctggatgccggaagttgcgagtgatttgaaatataacagtaagtatgctgtgaagtttgctttatccgatttgatgacatcctggaatgatgaggaggggaagtatgctgtaaatgtgatcggtgaagtttctctctaatcgatttttgatcggataaattgctaaaataataaattgatcgaaagagggaagtcttatggttgacgcttccctctgatataaaaatagtatgagacaaattcttttattactttgttttcttccacttgtattacatgggcaagcaaaaattacccccattttacccttgcctgatcatgtggaatatcaagaaggaacttttctttttcctaaagaacttcgtgtctatgcagaacaggctactgctactttccagtatatgaaggcggagttggagaaaagatttgatatccgagttttacaaattaggcaacaggaaaaagcagattgcatcctgttaaatacacatcgaaacagtcagtcggaagcatatattctaaccattaaatcatcatatataaaaatgcaggcagatactgaaactggcctgttttacgctttgcaatccctgattcaattgatggacggaactcgggagcggcctatgcggttggccgttcaatgtatagaagatatgccacgattcagttggcgttcctttatgctggacgaagctcgctttttcaaaggcgaggaagaggtctgtcgtttgttggatgtgatggcgcaattgaaaatgaatgtttttcattggcacttgacagacgatcagggttggcggattgaaatcaagaaatatccgttattgacaaagattgggagtaaacgaagagattcgcagtctggtggattcaatagtgaaatctatatcggagaacctcatgaaggattttatacacaggaacagatcaaaaggattttggcttatgccaaagaacgccacattaaagtagtaccggaaatagaaatgcctgggcatgcttcagctgctattgcttcttatccctggctggggtcgtcagatgagaaaatcgaggttccggttcgtttcgggaaactttattcggtgtacaatgtaattgatccgcaagtgcagactttcctcaaagaggtggttagtgaggtgctagatttatttcaatgtgatgttattcatgtcggaggtgatgaagtccgttttaatcaatgggaagctaaccccatgatggtttcatacaaaaaggagaagggatttacttcgtttatggatattcagatagaatttactaattttatgtcgcgttttattcaagaacatggatgcagtatgatggggtggaatgagatattgggcaaaaatctgcataaggatgatcatattgcttttgcagatcctagtcagaagattgcttccaatgtggttgtacaattttggaaaggtgaattggacgaaatgagaaaagcggcagaaaacggttatcggttagttaattcatttcatgcatatacctatctggattatagttatgaggatattccgttgcataaggcgtatgagtttgaccctataccgaaagggcttcctcaaaaatatgagaaaaatataataggtatcggtgtacagatgtggggagagtttattccgactgtcgaacgtatgaatgaacaactatatccgcgtattgctgctttggccgaagtggcatggagtaaccggaagagtgattacgatcattttctgtctcgtttgattggtgtgaaagagagatggagaagtttgggtatacaaatcaaggattgaatatatgtatagatggattgtgatttggacttggttgttgggtagtgctggaatgggatatgctcagtttcaacatgagacacgacaagtattaatgagtgggaaacgggtgattcaagttggagactcagtttctgctgacgttacttttcattgttctcaaaatgaaaatacccggaagtatttgcgcatagttggtggcggacagttgcccggacgttttaaggaacggggagagacactgtttcgtgatatggaatatcaaatagacgactgtctggactcattgcagacaaagagagaccgttatgccctctgtctgcagtcagagggagaatcttttgaacaatgtgcttataacaggatagcaggtgaacgacttggagcgggacgactggaaatggaagtatacgcccagtcggaaaatctacaactgtttgaggatggttatgtgggagtagaattacaagtgtattatccgaaacctggaagaaatccgcaggatatttatgatgttccagatacagtgttggtaactgttctcccgtcaggtacttattcatataagaaatttaagtatgctttcactcttaccgaggaacctgctaccgtattgctgaaagtaggaggaaagagcttttctggactttgctggttggaggcaccgattataagatcagcgggaaacaccatagataatttagcttttacgccttatgatcaacgtccggataaagttaattattgggtaggagttaatttggtaagtaaatgttggccggtctggagtctgaagtttgatggaaaaggaatattcaacggaaaggtttttgaccgtgcttctaatgtggcagatttttatattccattgccggacaatcttccggaaaaagggaagataactctaatattgaaagatgaagcccacaagggccatgtaccttatgaaatgatttcgatggaaataatagaggagagtgccaatgattttgaaatcgttagtttaccacattacgttgctataggtgatacagccggagtattgattgaaatcaacaaacccgggatagaattggtcttaacttctaatggacattatgaatggttgccgcaatcactgtatttcacagatactggcctatatgtactccgtctgcgtgcatgtgaggtgggtacggatattccggttactgtatcagatggaaaagaagagagaacagtttgtatctcatccattttacatcgtcagggtcaacgggtttatctttcttcaggagatgaaatttatatcgataaggttcctgcggtgtatgattacttctttaaatggtattttaagtcacgcctcggtaattggtaccagtttcgtccttcatatcagtggagtgggttccgtcaggtagacgataaagtgatgtctcgttattttcagctgctaaatgagatgagtgtgccttttgcatggcaagtggaaggacgtacgttagccggtggaggaataaacccttctttgtcattgctatattctccgatgtttaaaggaaagcaggcacatgaaaatgacggaggttactattactggcagcattttcaggatgaaggcttgtttacggatatacgagcccgttatttgccgcttggtggaatcttcgccaaacatcgacctatctatacggataagggcaagtttgtgcactacgatccgtatggagtaaaagatatggcagatggagcagaaacttttgtacgtcatttggcgggttcacgaggggagagtatacggcatacggggccgtctactatgttccgttatctctttcaggccggttatcaatgggctggagcggaacagatgtatggaccggaagagacaattatgtcagcattgcgtggagcttcccgtgcgtatggaaagcaggattacggttcgctgcatgctatgcaatggggctcgtctccattcactacccccgaacatgccttgcgtttatatttgtctctggctacagcttatatgcacggttcttcacatctgaatacagaagaagcgttgtggacggatgaatatgccaatgaccgttattcggagtctgggaaacaacatcaatatgctcaaaatcagatgcttgattatattgaaactcattctcgtttaggaaagttgaagacgaatatagctgtattgcaagggcgtaattgctcctggaagtgttttggacgcacttctatgtggtcacaaaagggtgagaaatggcaatttgacaaggtgaatgaaagttttgatctattgcatgtgttttatccggataatatcttggatgcgtgtgctcccgaaggatggtttactttaaccccttatggttccgtggatattttgcctattgaagcggatgaccgggtgatgcagcaatatcgtgtacttgtttttctaggatggaatacatttcatgcagatgactttcgtagaatccgtcgctttgtagaacaaggagggacactggtgttgtctgctgctcacttgaataagaatttgcagccggacgaagttccggcttttccagaaaatgatcaggagatctgtctgttattgggagataattatcgttcattgaagtctaaaacagaaatcgacaggggaaaaggacgggtgatttactatcctcaagttctttatccatctgaatctggtattcgtgctgactatgagaaaactctgcatgaactggctgaggcagaagttgtgaatgaagtggcgaaaggttatgctaaagtagaccagaaggttagttttacagtttgggatactccgcttaagaggactatttattttttgaacatagattgggcttccggtcagaagatgcatcaggctgaattgatgttaggtaataaacatttttcggtgaatgtacgtccttatcagttggaaacgcttcacatagcttgtggactggctgttctaccattatccaatacaacggatattctttctatcgagaaagacggggaagggtggatgataatggtacagacaacaggaatggatactttgagagtctttaatagtatttctggagaagttttggaatatgcgattacgaattcaggagtttctactttgaaaatagataacaatgatgtaacaacagataatttaaattagaatagaatatgctgaaaatttgggtttacattcttttacttgcaggccttttgtgtagctgccaaaccgaacagttgcctgtcaatacattggcagatcgtgtgacggagggtacttcgaaagatcgaattctttttcggatgattgctgatgaaaacaatccgttaaaagattattttgaaatatcttctgaagacggtaaagtgctgataaccggaaactctgatttgtctctggctacagggttgaactggtatctgaaatatgtagccggtattcatctttcctggaataatctttcgcagaagttaccggaagtgctaccgcttccacaagaaaagatacgtaaggagacatccatgcagaacagatattatctgaactattgcacctattcttattccatggctttctgggattgggagcgttgggaaaaagaaatagattggatggcaatgcatggcatcaatatgcctttgagcatcaccggaatggaggtggtctggtacaatttgctgaaacgtttgggatacacaacagaagaagtcaatgaatttatttccggcccggcctttatggcttggtggcaaatgaataatctggagggttggggtggaccgaatcccgatagctggtatcagcaacaagaagcgcttcagaagaagattgtagcccgaatgcgggagttgggtattgaacccgtattccccggatatgctggaatggttccccgtaacattggtgaaaagctaggttatcagattgctgatcccggtaaatggtgcggattcccccgtccggctttcctttctacggaagatgaacacttcgattcttttgccgctatgtattatgaggaattggagaaactctatggaaaagccaactattatagcatggatccattccatgagggaggtaacacggaaggagtcgacttggcgaaaaccggtgcttctattatggcagccatgaagaaagccaatacgaaggctgtttggatcattcaggcctggcaggcgaatcctcgggaagaaatgattgcttctcttaatcagggagatttgctcgttttagatttatatagtgagaaacgtccccaatggggagatccggattccatgtggtatcgggaaaagggctttggcaaacacgattggctttattgtatgttgctgaattttggaggtaatgttggtttgcacggccggatgaatcagctggtgaacgggtattatgatgcttgtgcacacactaacgggaaaactttgcatggagtaggagcaaccccggagggcatagagaataatccggtgatgttcgaactcctttacgaacttccttggcgtgaagaacgcttttcttccgatgaatggttgcaggcttacttgaaagctcgttatggcagagaagtttcaccggaaataatggaggcttggcgtgcattggaacacaccgtttacaatgctccgaaagattatcagggtgaaggaaccattgagtctttgttatgtgcccgtccgggtttccatctggacagaacttccacttggggatattccaaactattttatgctcccgattctactgcaaaggcagcccggctatttacttccgttgccgaccagtataaaggaaacaacaattttgagtatgacttggtagacatcgtacgtcagagtaatgccgataaaggaaatgtgttacttgaagaaatatcacagagctatgaccgaaaggacaaagaggatttccgcaaacaaacacagcaattcctggacttgatattggcgcaagatcgtttgttatctacccggaaagaattttccgtttcctcttggttgaatgcagctcgttctctgggaactacagaagaagaaaagcgattgtacgaatggaatgcttccgcattaatcacagtctggggagatagcattgctgccaatcaaggcggactacatgattattcgcatcgggaatggagtggacttttgaaagacttgtattatcagcgttggaaagccttctttgagcagaaacaggcggagctggatgggaagcctgcaggacaggaaataaacttctatgggatggagaaagcctgggcagagaagagtaaggcacagacattgaagaactaaataaaagcaagtgatatataagtaatatgcacgtaatatatagccgggtatgaaatattatccggctatatttgtcttagaaccctttcataaagaatttctaatttcattgctaataggaaaattcttatatttgctgcaactaatacttaaacacaatagttgcaaatggaatttacagaagagcaaatactgttgagagctttgtcacgaggagatgagaaagcttttgaggttttgtttatgcgttatttcccgagagtgaaacgttttatatccggtttgcttcaggatgatataacggccgaggactttgcacaagatattctcctcaaactatggcagaagcgtgaggagatggcaaaaatcgaaaatctgaatgcctacctttatcggacttcccggaatgctgtgtaccagcatttacgacatatacttttggtgaatgaatatggagaaaagcaacaggagaatctttcccgtcagcagaatgagggtgcgggaaacatcgaagaaaatatgtttgccgaagaattactgctattgatacagcatacggtagagcaaatgcccgcccaacgaaaaagaatttatgagatgagccgtaaagaaggtaaaaacaatgatgagatagcgcaactgcttgcaataaacaaacggactgtagaaaaccatctcacacaagcattggctgatatccgcaagatgctgaagcacttttatcttttctaaataaaaccactttctattgacaaaaactcttcttttattctcctttctcaaaaaaagtagaaaaaatagcttttagactgtgtgtgtattctatctcgtgcatcttattaataaacggataaaatcatgaagaagaaaagcatatcagaactaatacatttttttgttcgccatcccctgcaaaactccttgcagatgaagttttggcgttggctggtttctcctgctgatgcagaagataaagaagaagctatacaggaagagtggatgaatatcatcgctgaacctgatgaggccacccggcgttcatggtatgaggtccggcgtaaagcgggacttgcaaatccggtaataaaaccgcattgggaaatcaaaccacttcttcgcattgcttctatgatattaatccccttattttcagtgctattatcgtggtattatataaatgattatactgattcttgcaaattggtagaatatattgttcccatgggtgaacggggagaattgactttgccggatgggacaaaggtacagatcaattcggagagcagtatcatttacccgaaaagctttcgaggcgatacacgtactgtttatctttccggagaggcgaattttgatgtccataaggataagaaacatccgtttattgtcaagacatctttgttatcagttcgtgctttaggtacgaagtttaatatacaggcatattcggaagacaggaaaacgactacaactcttgaaaatggaaaagtgcaaatcaataacctgctggcaccagacagctgttttattcttactcccggtgaacaacttgaatacaatcacctgactaagaattatgaaaaacgaaaaatagatgtgatgatggcttccggttggacacgtggtgaattgaattttgtcgattgccatctggaggatattctgaacacattgggacgacattataatgtagaaataaaggcagaaccgcatttatacacaaatgatttatataccattaagcttagaaagggcgaacctcttcaagcagcaattcatattgtaacaatgaccgtcggaggtatggaaagcaaggtcacagacaataaggttgtgatactgacagctgcttcaccggcgaataagagtaagaaaggaggtacccatccataaaaaggttggacaaaactgatccttttgtccaacccgaaataaataccgttatcatttaaaattttaggaaatagtgaaccttaaatgtagtattcatttaatatacaaaagtatgaattttaattcttattttactataaaacataccagtaatttgcgtattttattgttaaccttattctttatagtccctttgggtactatctatgggcagaatcagttgattactattgccggaaaaaacataactttgttgaaagcttttgatgctattgaaagtcagactcaattaagcattacttatagtcggactaaaatagatgtgaatcggacattgagtgttgattttaagaaacaaaaactctctattgttttggataagttgctcgcgggaacggggtttacttacaagatagaaaaagggtatatcgttctggttcccgtaccggtaaaacaagagcaaacggaagcaacttcgaaaaagatacaaggagtgattgtagatacgaatggagatccggtgattggtgccagtattcaggagaaaggagtggtcgggaaaggtacagtttctgatttggatggaaaatttaacctgtcagttgcgtcaaatgctgtattactgatttcatatatcggttttcagtctcttgaagtaaaggtgggaaatcggacaagcttgtctttggtattaaaagaagatcatcagttgctggatgaagtagtcgttatcggttatggaacaatggagaaacgtgctgtgaccagctccattacttccatatcttcaaaagatttagtgactggattgggaggctctaccattgcgactgctctgaaaggaaaaatctccggtatgaatgtttccgagacctccagtccgaatgcctctgctagtttccagcttcgtggggtagcttccatcaatgcttcttcttcccctttgattgtgatagacggaattcctggtggtgatttgcgttctatcagtcaggaagatattcaatccattgatgttttgaaggatgcctctgcaggtgctatttacggaacaagggcagctggtggtgtcattctcgtgactaccaagaaagcgaaagaaggtcctatcacattatcatatacaggcgagctgtccaccgaacaagtttccagaagaccacaggtcctggatcgcgatgctttcgtgaggttcggtgtaggaacagatttgggagcgtctaccgattggtacggtgaacttttaaatgagggagcactttcccagcgccatgttgtcaccctttcgggagggggacatacagccagaatatatgccactattatggcacaggatcagaaaggtattgcgataggcgataatcgtaaagattattcggggcgtatcaatgcaaactttaatcttctcaatgacttgctggaaataggcttacatacagaatatcgtgaagcacatcgggatcagcggagcagtagttcctgtttcgacatggcattgaagatgaatccaacggaacatgtttatgatagtactagtgaaacaggctataatgtattggttggtggtagtgaatattacaatccattagcggaagttatgctcaagcagacggataatgttgataaatggctcaaggcggatgctacggtaaagctcaatctgcctgccggattttcggcacaagccactctcggctgggaagatcgccagtatcaacagacgcattatgtatccgcattacacagaacgtctttgaatggaagttataaaggaaagggatttcacggatatagtaaaacagtcaatgtttcttttgaacctaccattaatttcatgcgtgtttttgcagatgaccatacagtcagtgcggtggccggatatagctattgggaaaacaattctgaaaattttgatatgtctaactacgatttccctgtggatggagtaggagcttgggatatgggaacaggtagctggctttctgacggaaaggcggctatgtcgtcccacaaatatcctcgtgaacgtcttatctccttctttggtcgggcgaattatagctataaagatcgctatatggttaccggaagtgttcgtcatgagggatcttccaaatttggaaagaatcatcgctggggaacattctgggctgtatcaggtggatggcgtatatccaatgaagcctttctgcatgatgtcagttttcttgatgacctcaaagtacgtgtcggttatggtgtgacgggaaataacaatttctctgcaggagcatccacagccatgtactcctccaattcaatgtggccttataacggtacatggatcacttcttatggaccggctcgtaatgtcaataatgacttgcattgggaaaagaaagcagagcttaacatcggtttggattatgcgtttctgaataaccggctttttggaaagttcgatatatataaaagaagagtttccggaatgttatacaatatcagtgtacccaatcctcccgccgtttacgagaaaacgaccatgaattatggtaatcttgagaataccggatgggagtttgagattggcggagtgcctgttaaaacgaaagactttaactggacaactaccatgcgtctatcccattcttcttccaaaattacctctttgtgggggaataatacttaccaggatcgtgtaggattcccgtcaccgggaacgaacggatcagccggaagaattgaagcaggaacaaagatcggaagctattatatctggaaatatgccggtatcacggataatggaagatggcttctgtatgataagaacgacaatgtgattcttagcgataagaagacctatgatgacaagcggtacatcggtaatgctattcctgcattgatggtatcatgggatcataccttcacttacaagaacctctctttaggtatcaacctgcgtagctggatcgatttcgacgtgtttaataccataaatatgtactatggactttctgaagtagcaggccagaacgttcttcgcaatgcgtacattgacaaccggcacatcaaagaagtaaagcagctttgcgattactggcttgaggacggcactttcttaaagatagacgccattagtctgggatattctcttaacatgaaaaagtggcagaaatatatagataagattgatctttacctgaccgtccggaatgtggcatgtttcacgaaatattcaggacttaatccggaagtgaatgtcaacggactggaccctggttatgaatggtttaataatatttatcctgaaactcgtagatataccgttggtatgaaaatccaattctaatattaaagtacctataaactaataaaatgatatgagacgaaatattttaatcattatctccttcctcacccttctggtgtcatccggttgtacaaatctggatgagaagtggtattccgaagtcactccggacacttatttcacgtctaaggaaactgtttattctttcttggtacgctctttcacacattggcgttggtttcacggattcaaccgtgccattcttcaagaatgtacaacagatgagatgtgtgtcacacaaaaaggaatacattacaatgatgtcagatattcccaactgcagcatcacgactggacacctcttcaccccaacaacgaagaaacctggcgtggggtaggcatgggagtggcaatggctttagcttgtaaggaagacttatccggtgtggattatgtatcactgggcatgacggaagaattgaaagcagatcatcagatgcaacttcagacattggttgcctatttttatctgcggggacttgatttctatgggggtatgcctatttaccggcgctctactaccgaggaagttccacgttccactgcacgcgaaacctttaattatgtggaagaactgttgcttgccgctattcccaaattagagaaaaaaagagcagatatgctggaagaaggctatttacgtcaaggaactgccgccgcccttcttgctcaattatattttaatgcggaagtctacatgggagagaaccgttttgctgaatgtgcgcaggtctgccaggatctattagatggcaaatacggttattacgaattggaggaagactggttcggtcctttcactttcgacaataataaatctaaggaagtaatgtggtctgttcagtcgcaatatgcaaaaggcactttgtttcaatggcagttcgaacgctataatcattataatgcaaagaactattttgatctaagcggctattcttctactaatggtatgcatcttcagccgtctcttaaacccaatggcgatccctatacggataagcttgggcgaccttttgccaaattcaacaataaagatcttcgtaaaaaattgtacttgtataaagggaatggaaaatacgaaggaatgttcctttatggaaaattacagcgtacatcaagaagtggtacagaggtgaagtgtacgggactgtacgaatatccgggtgaggttcttgaatttgtcgatcaggtggcacaattcaagaaagtgaaagatggagaatattcttcagtgaatgagcttccctccaatataagtaccggggaagagaattccggaatacgtttgtgcaaactaccggttcccgacaatatcgacaaaaccattgcttttaatccggattatccggttattcgttttgctgaaatctattatatgcttgctgaatgtaaatatagaagcggctataaaaaagaagcagccaatcttttcaatgaagtgcgtaaacgcaatttcgagaataaagccgatcctgatccggtgaccgaaacgaatatcgacaagtaccggattcttgatgagtggatggtcgagtttctgggtgaacagcgtcgtcgtaccgatcttcgtcgttgggggttgtatacaacaggttcttggtgggatcataaacctactaacgacgatcattatgagctttttcctattccggaaaagtcaatttctgtcagcaatgtcttgaagcaaaatccgggatacggaggcggcaatgaaatgactaaagaagaagccggtatctatagtgtgaagcaaatcgattaatcaactattaaagaataatataatgaatagcaagatattttttttaggagccatcatgttgctgcctacattcgcaagttgccaacaagaaaagccttttcctgatgatgcagtagataaagtgtatgaataccttccggagtggcaggcaggttatttggatattcatcagattagtaccggaagaggtaatgcagcctatcttatttttccggatgggactaccatgttattggatgcaggagatttaggagtacattcaggcacacaggaaattatgaaagcagtgcctaatgattctaagcggcctgccgaatggattgctcaatatataaaacatttctcattgccattaaaaaataacggagcacttgattatgccttgctcactcactttgatacggaccatatcggacagaatggaaaactggcaatcgaaaaagtaggactggattacaaacttaccggaatcactcatgttggtaatcttctcaatatttccactttgatagatcgtggttatcctacttatgattatccgacagcagctaaagtctctggtgctcatatctcaaactataaattatatgttgccgctcgtgacagggaaggtaaaaagaatgagggatttgtaataggaagcaatagtcagatcaaactcttgaaagatccgggctcttatcctacattcgaagtacgtaatatcgtgggtaatggtaaaatttggacaggtagcggaacaacagccaaagagcttgtgccttctacagcctcttcaagtgaacagttgaacgaaaaccgttgcagttgtggaatccgtatcacatacggtaatttcgattatttttcggcaggagatattctgggcgtagaaaaagcaccggaatggtttgatatagaaacgccgatagccaaattactcggtgagacggatgtggttgttgccaatcatcacgcttattctgatgctatgtgcgatacctacatttcccaagtgaaaccacaagtctatgtaattcccgtatgggattactatcaccctcaaccggcaacgttgagccggatgctgtctcaaactctttatcctggtgaacggtcggtttttgctgccggtatggtagacagtaacaggagcagactgggtgaagacggcttgaagataaagcctgccggacatgttgttacgcgtgtttatccgggtggagagaagtttcagatctttgtattaaatgatcggaatgaagcttatgagatactatataaaacaggtgagattaaatctaataattgatgaacatgaaaattaaagagtcaatagcctggacagcttttctggctgtgatggcaatcataatgtttccgtcatgctctgacgaacatgaagccggtatattggaaataacaaataatgagattattcttcaggcggaaggtgatccggttcaggtggaggtgaagtccaataccgagtggcgaattgattttgtagaatcaacctggttctctacggatatacgtggagcccagtcatcaagaacttatttcactgtgacttatgatgagaatatcagtgattccgaacgtttctgtgatattcgtgtgtttacgaaagatggtaagactgcggatgtaatcaagataaaacaattatcccgttatccatttattgttcctgccagtgataagatggagctgtttactaaaggaggtgaatatgaaatggaaatctctaccaatgtgcccgaaacggatatcgttattacgccaacggtgaactgggtgcaggagtataggataagtgatggaaagctttattttaatacggaaacaaattcgcaatcaccccgtacaggaagtattgtgttgagttatgacgatcagtaccagcgtaaggtcacggctaccattaatctctcgcaagcatattctgaatatgcgaatgcggaacttgtcagttatccaaccgtacatggttatgctgtcggtggaattactaacaatgtatatgttgaaggaaccatcgtagccaatggcacttcgaagaacttcccgagcaatcgctatgtcattcagaatgaggcaggagagacagttgtgtttgagtccgaatctttaattacgtttgcacaatttgccaaagtgtcattgtgtctgaaagatggaatgataagagaagaatcagagggtagctttacttatagactgattagcggtatcactgctgcccacgtaatcagctcggaactttctaccttcacaattcctgaaagaacgattgctgaacttacggataatatggtatttagtcttgtgaccctgaaagatgtcgagattgcatctccggtaggtgcattcactaatttcaagactactgacccgggagctgccgatcgtaagattaataaaaactattgggtagaaaagttccctgcatattacagatactatccgacctgtataagagataaaaacggttctaatacatatatgcttactgcgtttgaagctccttatgctcacgaaacacttcctaaaggttcgggaagcataacaggaatggtggcgaaagtgaaacttacaaatttcgacatctctgaaagccggttatgtattcttccgcttaacagagaagatattaacatcagtgatataaacgagatcacttctgtgcttgtagaatgggattgtaatgtacccgattggaaagaaataggctcttctacttttacggattaccatcctacgggtggcgaggcatcgcaggcgaatgctcttcttagcaaagacggaaataaatatttccagcaaacctatgcagactacattctgggattccaggatgatttcagaggagatgttaaccttaacacgaccgatggatactatggtcgtatgcgaggcggtgcttttaatagtaaaccgtggtctacaagttcatatttctacgtagacaaaatatcgacagtaggtatttctacatccttgtctcttcaggttgaaatgaatgcaagttggggaggtggccctgttgcagtggttgaatatgcttattcgatgaatggtgaatggattaaagtagataattcagagtttaccattctgggacagtttgatagaacggctgcaggtggacagacggagaagaacattcctggttataaagtctatgactttaagttgccggatgccttattgaaccgtgataatatttgcatcagattgcgaccggtcagactcccggcaggggtatccagcttcatgccgcttagacttgctaatatctcaatcaaatacaacaaataatcaatagggaatatatataaaataatcggaagcaataaaggacatatcctgattgcttccgattatctttttatatgtggatcttgaacgatctctattcaaaaagaacgatatcttatttctccaaaaattcttctttatttttccaacaaatcctttaagaagtcgtccaactccttatccaaccctttcagcaattcatcattcaccagtatggtatcgtcgtcaatcaacagcaattctgctacggtttctttctcttcatctaccaaaacgaaagaataaggtttcagaatagtcactttgtcgaaatctccggcatccttcattctgcaaagaatgttgcgaagagaaggttccacgttttcaaggaaatcatccccttcataagtagcccattcttcgatcatgatgtttgccagttcttcatcatcatcgttgtaaatattaagttgtcccgatgcctgatccggttggagatggatatcggttacaactgtttgttcacagctacatacatatttagcgactgccttttggatagccgattcgataatagataatgattgttggctcaatttcatgggttccttctttttataagttcaaaggtataaaaaaaataagatttgatacacaatttccttaaaaatcatcattaaatcggctcatttgcaattttaacttgggtaattgagcatttctctcctttagttcagctaaatacaaagtagtaagataataattcggcacatcatcaatggtagcttgagggctatctgtgatgttctttttatctatttttttagctagttgttgtgccttttctgcccattcttctgctttagccaaactatctttcatttcgtagtaaacagcaatgttgagagctgcccgcatttttttcttttggttcttggtaccttcgaaagcctgacgccaaagttcgtatgcgtcgtcccatgaattttcgcgtacataaatggcagcgtcacgcataggaaccgaaccaccagtataaagataccgtgttccttttttccaaatagggacaatatttttcaccggaaccgttcccgcgaatgctgccgcttcttccagcatctgcttgtcgggaatcatgcgagtggcggcttctatggctgtacctccaaactcctcccaaaaaatgctatcattaggatggagcgtagtcatcggtctgctacgttcgggaagataaactttcaccgtgggataaactttcacgtctaccgctccttgaaagcagttgaactcatccagatagcggacagtctttgttgctttgagttgtaggttttccagcgcaataataaagtccactcccaagttagaagccagttgacgcacttcctcctggctcaatgtactttcgcgggccagtttatcattggcgcgtaaggcagaatcacagataaccacctcatcgaagtagttctgctgtgcaatttcttctgccagtgattcagtggctgccttaggatctccattggcataagccgttgcacgacttatcaatggtgtaccttctttaattttttcagtctctgttatcagtttattatccggggcgtcgctggtgttattcacaatagctactttccggagttgcggaggaaagctcaagtcggcaggttgcagataatcaatggggatctgttccagactctgacagctacccagagtcagcaggaataaaacgatgaaaaccagtgaataagattttgccatagttttgttctatttagtaatttgaacaaaagtacaactttggaagaataaaagaaagtctcaaacagtttttaaccgtttgagactttcttttataagttgaatatagagagactatgccataaagcacattaccctacaatttccaacctttaatttttaattattaattaatcaaaggttctttccgtggcagtttttatactttttcccgcttccgcatggacaaggatcgttacgacctactgtcttctctgcacgaatcggttcacgtttctgctgttcacgagtatcctgacttgcagcagcctgctggttcggatcactcaaattttctttgttttcgcgatacttgctcatatcctggcgttgttcgggagcagcctgacgcacttctacacggcgtgcagctgattcatccggagcttcctgtacaggaatttgtccacgcatcaaaatagatatagtctggttattgatcttgttcaccatagcgtcgaacaaagtcacagattccagtttataaatcaatagcgggtctttctgctcgtagcttgcattctgtacggaatgtttcagttcgtccagttcgcgcaagttttctttccatgcttcgtcgattacgtggagcaagattgatttctcgaacgacttcaccacttctttagattccgattcgtaagccgctttcaggttacaagagatattatacatccgtttaccgtctgtaataggaatcaggatgttttcgtacatgtgtccctggttttcatatacttgtttgataaccgggttagcgatctgtgccagacgttcagttttgcgtttgaagttatccatcgcaatgttgaaagtcttttcggccaacttttcttttttctcgttacggaattcttcttcagtgaacggagtttccattgctaatgtctgaagcagttccatttggcagccttcataatcattgttttcgatagcattggcacaacggtcccagatcatgttcacgatgtccataccgatacgttcacccatcaaagcgtggcgacgtttggtgtaaaccactgtacgttgcttgttcattacgtcgtcatattccaacagacgtttacgaataccgaagttgttttcttccactttcttctgtgcacgttcgatggagttggaaatcatcttgtgttcgatcatttcgccttcctggaaaccgagcttgtccattacactggcaatacggtcagaagagaacagacgcatcaaatcgtcttccagtgatacgaagaatacagaagaacccgggtcaccctgacgtcctgcacgaccacgcaactggcggtctacacgacgggattcgtgacgttccgtaccgataattgccaaaccgcccgcagtcttcacttccggacttaacttgatgtcggtaccacgaccagccatattggtagcaatggttactgttccgcttaaaccggcggtagcaacgatgtccgcttctttctggtgcagtttggcgttcaataccttgtgctcaatcttacgcatggtaagcatcttgctcaacatttcggagatttctaccgaagtagtacccaccaataccggacgtcctgcttgaaccaatttttcgatttcctcgataacagctttatacttttcgcgtttcgtcttgtaaacgcggtcgttcatatccttacgggagatcggacggttggtcgggataacgactacgtccaatttatagatgtcccaaagttcgcctgcttccgtttcagcagtaccggtcataccggatagtttgtgatacatacggaagtagttctgcaaagtaatggtagcgaaggtctgtgtagcagcttccactttcacacgttccttagcttcgatagcctggtgcaatccgtcagagtaacgacgaccttccataatacgaccggtctgttcgtctacaatcttcacctgaccgtcgattactacgtattcatcgtctttttcgaacatcgtgtaagccttcaacagctgattgatggtgtgtacacgttccgatttgatggcatagttagtcaataactcatccttcttttcaagcagttgctcgttggtcagattcaggttttccaattctgaaagttgtccggcgatatccggaagcacgaacaatgtcgggtcttcagagttaccggtaatcaggtctacacccttatcagtcaggtctacgctatttagtttttcgtcgattacgaagtacagcggatcagtcacttcatgcatacgcttgttgttctgttccatgtagatctcttccgtcttgagcatacctgccttgatcccctgttcactaaggaacttaatcaacggtttgtttttcggcaatgctttatggctgcggtatagagcgaggaatccttcttccacctctttcttatcgttggatgcgatcagtttttttgcttcggaaagatatttggtagccagtaccttttgtgcttctaccagacgttccactagcggacggagttgctcgaacaactggtcatcgcctttaggtacaggaccggagataatcaacggagtacgtgcgtcgtcaatcaataccgagtcgacctcatcgacgatggcataattgtgctgacgttgtacaaggtctttcgggctgatagccatgttgtcacgcagatagtcgaaaccgaattcgttgtttgtaccgaaagtaatatccgccagatacgcctgacgacgtgcgtcggagttcggctgatgacggtcgatacaatctacgcttaaaccgtggaacatgtaaagaggacccatccattcggagtcacgtttggcgaggtaatcattcacggtaactacgtgtacgccgtttccggtcaatgcgttgaggaataccgggagtgtagccaccaatgttttaccttcaccggttgccatttccgcaatcttacctttatgcagaacgacaccaccaaagagctgtacatcgtagtgaaccatgttccacaatgtatcgttaccaccggctacccagtgattctgatagatggccttgtcgccttcgatgcgtacgaaatcttttgtagcagccagttgacggtcgaagtcggtagccgttacgacgatttcttcattttctgtaaaacgtttggcagtagcctttacgatagaaaaagcaacaggcagtacttcgtccagtgctttttcatatttttccagaatttctttttctgtcttatcgatttgtgcgaagacttcttcgcggtcttccagttcgagagtttcaatgcttgccttcaactcttccaccttcgcacgttcagcagtagccgattcatggatatattttttgagttcttccgttttggcacggagggcgtcgttgtctagtttttcaatctccgggtaagcagctttgattttttccacccagggcttgatttctttcatgtctcgtgtggatttgtttccgaaaaccgagcttaaaaattcattaaatcccatgttatattatttagtttattatttatctttttcttattgcaggccacattcatccggatagattttctcattccgcacacagattcaagaaagaaatctgtgtgaatcgatcgattatgtgacgaataatctccgcaaagttacattaaaatgctgatttatttatgttttgctccctgtttttgtgagtaaatttttaccgaaggtcggtaataggagcagaagtacaggcgttgggagcccggatacgcataaaatgtgccagtgtaggcgcaatatggtcaatggttacaggtgtctggataatggccggtttcacggaataccccatgaaaatcagcggtgagggaatataggaatgacgtaccaccttgttgtcgccgccgttctcgttgacgatagtccatccggggaggacgtcgattacgaggtcacccgaacgtttgcggtggtagccgttacgtattttgtagatttccggagtccatgaacccagcaatagccggttagccgaataggcttcgttcactccgctgaactgcatcaggaattctgctgacttttgttggatctctgccagattcagttctttcttttccaataacttatgattcagataaatctgctggttatggtgagcttccacatactttccttcgccatatgtagccatcaggtacatattcaatagagccgcacaacggttgaggtaaaactctccgccgggcactttgtacaatcccgaatcaggcgattcgctgtctatatatccggtggaagtgacgaaaataagtacattttgtagtcctactttcttatcaagaacttcgagcaggtcggcaatgctgcggtcaagacgcacgtaggtgtcttgtatttccatagcacattcctgtacggatttgtgcgcatagtttcctgcataataagtgagtgccaataagtcagtaatgtcatccatgccgatggagcttttgttcaatgcttcttcggcaagcgcattcacttcatcattcacaaaagggctggcgatgaagcggcggtatttattactgcggtcatcatcaaatttatatttgaagagcatatcccgccaatctggcaggaaagtgtacatgccccggggaaatatgggttcccatgtcataccggcaatacggaaatcgatcgcttgacggtcgttatattggcttgcccaccacggaaactctccataataggtggttccactccattttccggtgttgggattgagccagaaagcagcgtttccggcatgtccggctgcaaaaagtgcggcatcgcaatcaggtgcaatggcatatacgagtcctttgccttgtgtcgctattttcagctcgtcggcaatggttgaagtcagaagtttggtgggggcgacagtctggtcggtgtaataccccataaatgccgtgtcgtctgtgctgttgacggggcgaagggtagaggcatccatccagcgttgagaaataattccgttcatggaaggcgtcgtaccgctataaatagccgctatggcagaagcgcggtctataccgcagaaggtatatttggcattatggaacactcttccctctttccaaagacgtttgaagcctttctcaccgtagagtgacgaaaaagcttccagatagtccgtacgtaattggtcaatcgtcagccctaccactaatttaggggcggcaggtagtgactgggcttgtagcccggtgaaagtcagtacggtgatgagggaagttagtagtcctttcattatttctttttagatgtcacaatcagattgctcgctgaacgtatcagcaaaacgagtgccaaaggtacaacagcaaagtcaaatctttgcggaattaccggaaaaagcactataaaaagtgttaaaaccgccagattcagggttaaataccaacatttcttcccttttcggacacaatatataatgtatggcaagaaaagaagttgccccggatggaataccagtaataggaaattagagctgactgccgggtgttgggagaagagtgcgagaaatgcaaggacgcatcccacaatacctgctataccaaaaaggaagaggtcgattccccataatccggttctccggcggattccatagattgtggcggcggctgtcagtatgaataagagtaaggagcattgaagcggagtaggcatccagtcgctttcatccggttcgggagtggcatcaacaaccagttcgttggccgttatgagtgggcgctggatagaatcgcctttaatttgtgcaccatcgaaagcatccatcaggtagaatggggcaaacatcatctgacgttgtgtgatgggctggtcggcttcacttccgatacagagatcaatgccgaaacgtgcccacggatgtcctttgcaatactgatgtacaatgtcgcggaaagtgagggagccatcctgtggttctgcgggataaatcacttttcctgcaatgctttcttctatcttgtcccgggggcgggtagcacaattgtcgtaaaagaaattataacggtatacccggttttccggacgataattttcttgtaataaccggattagttctgtcttttcttcatcggtcagattcagcgtttgctgccatacgctgcgtccgaaaaatgcgtattcagctgcaaaacgttcataatccgttgctcccagttggtagtctgtttctccgagcgagaagcggaagatgaagttgggagtgttgaaactgaacagtccgtagttgaatacaatgtcaatcccttgtgaaggattttcgtaacggatggcagtgtgtccgaatagggaatatatttcctctccgggggcacaagtcaacaggctcaaacgggtggagtcgttgttgttggcagatgcttgtccggtgggcagaagcaacaggaagaaggagaggatggtgtatgagaaaaaccgtttcattagctggttcgttttatttcggtggcaaatatagaaagaatagttggattcgggaaaacggagcctctattttatcagaataaaggctctatatggcttaaacagaggcgctgttttctttaaatggagcctctgtttgggtgaaataatgtttctgcttgaacggaaaatcggttacaaaatagtggaacactttttggaacgctgtttttctcttgtaatctgttgcttattagttgtttatgatgtaataaaaaaggactgccgaacgcaaagtggaatacataataaacaataaaagataattgatctatttaaaaatagatagttcgatttttttgtttggggggatttctaaaatgaaaaaagaagataattcctcttctatgcttcaacttttctttttttactttacctttgcgcccgctaaagaaccaaaagatttgaatttaataatcgacataggaaatacaaaggcaaagattgctttcttcgacggcggagaaatggtggatgtagtagctgaatccaatcagtcgctgggttgcttgaaagctctttgttctcaatatccggttgaacaggggattgtggctactgtcattgatctaaacgaaaaggttttagctgatttggccgctttgccgtttcctttgctctggctcaatcatcagactccgcttccggttgtcaacctgtacgaaactcccgaaacattggggtatgatcgtatggctgccgtagtgggtgctaatgagcagtttcctcatcgggatatattggtgattgatgcgggaacttgcattacttacgagtttatcgactcaaaaggccagtatcatggcggtaatatttctcccggtatgcagatgcgtttcaaggcactgcatcagtttacgggacgtttgcctctggtagacaccaacgggcgcaaactcccgatgggacgggacactgaaacggctatacgcgccggagtgatgaaagggatggaatacgaaatttcaggttatattgagtctatgaagcataaatatcctgaacttttggtttttttaacgggcggagatgatttttcttttgatagcagcgtaaaaagtatcatctttgcagatagatttttagtgttgaaaggattaaatagaattttaaactataataatggtaggatttaaacacacactttgtgcgcttttgctcacgatggttaccggaatggcaatcgctcaaaataatacaaactctccttatacacgatatggctatggcgacttgtccgatcagagtttcgggaatagcaaggcgatggggggaattgcttttggacttcgggatggagcacagatcaatccgctgaatcctgcttcgtatacagccattgactcgttgacgtttatttttgaaggaggcgttagtctgcaaaatatgaatattagtggtggcggtgtgaaactgaacgctaaaaactctagcttcgactatctggctatgcaatttcgtttgcatccgaggatagcgatgagtatcggattgttgccgttctccaatgtgggatattctgtatcggatacacagactgcaactgatccggggactggtgctacggctgattatgcaagaaattataccggggatggaggcttgcatcaattatatgccggattgggtgtgaaggtgctcaaaaacctttcggtaggtgtgaacgcttcttatttttggggagatataaaccgtacacgtgttgtttattatccaagtgtatcaggtgcttataattataatcaccagtcgattgcatcagtttcgagttataaactagattttggagcacaatatacattggatattgacaaaaagcattcagtaacaattggagctgtgtattctccggaattgaaactgggtaatgattatagtgtaacgacgcaaatggtatcaaactctacgggtacagctgtttctactaccaccttgaacccggatgctacacttaaagtgcctaatacttttggcgtcggctttacatataactatgacaaacgtttgactgtcggtctggattatagtttgcagcagtggtcaaaagctaagtttgacgtaaatacagcggatgatgctgtacgtgaagattttaatgaaacatacacgtattgcgaccgtcataaaatatcagtgggtacggaatatattcccaatttgattggacgttcctatttatcccacatcaaatatcgtttgggagcttattatacgactccgtattataagattggcggtaaagacgcagcccgcgaatatggcgtaacagccggtttcggtctgcctgtgcctcgttcccgttccatccttagcatcagtggacagtttgttcgtgtaagtggacaggaatcgacctttgtaaacgaaaatatcttccgcgttagcatcggattgacgttcaacgaacgttggttcttcaagcgcagagtagagtaattgggatgaatgtaagaagagaaagaatagacgactataataataacaactaaaatttagatacaatgaaaattaaaacgcttgtggctatgttgttcctttcggcaggggcaaccactgtggtagcacaggatgcgactaactgtaactcgaacagtagtatctcgcatgaagctgtgcgtgcaggtaactttaaagatgcgtatactccttggaaagctgtgttggaaaactgcccgacgcttcgtttctatacttttactgacggatataaaattctgaaaggcttgatgggacaaatcaaggataggaataatccggaatatcagaaatattttgatgagctgatgaatacgcatgatttgcgtatcaaatacacagatgagttcttggctaaaggtacaaaagtgtcttctgctgatgaagctctgggtatcaaagcagtagattacatcgctttcgctccgaaaattgatgttaatcaggcttatcaatggttgagccagtcggtaaatgcagtaaaagctgaatctgctgccgctactatcttctatttcttgcaaatgtctttggataaactgaaaacagatcctaaccataaggaacaattcattcaggattatctggctgcttctgaatatgctgatgctgctattgccgctgaaacgaacgaagcaaagaagaaaaacttgcaaggtatcaaagataatctggttgctttgtttgtaaacagcggaacggctgattgcgaatcactgcaaaacatctatggaccgaaagtagaagctaaccaaacagacctggcttacttgaagaaagtaatcgacatcatgaaaatgatgagatgtacggaaagcgaagcttatcaacaggctgctttctatgtgtacaaaatagaacctagtgcagatgccgctaccggatgtgcttaccaagcatttaagaaaggtgacattgacggtgctgtcaaattcttcgacgaagccattggattggaaactgacaacgtgaagaaagctgaaaaagcatacgctgccgcagcagtattggcttctgctaaaaaactgtctcaagcaagagcatattgccagaaagctatcgggttcaatgaaaactatggtgctccatatatcctgattgccaatctgtatgcaatgagccctaactggagcgacgagtcagctttgaacaagtgtacttactttgcagtaatcgacaaactgcaacgtgcaaaacaagtagatccgagcgtagctgaagaagctaacagcttgatcggtagatattctggtcatactccacaagctaaagacctgtttatgttaggttacaagcaaggcgaccgcatcactatcggcggttggataggagagactacaacgattagataaccgtatgttgcgaaaacgaagaaaccgtttgttgcataaaagcatgagcataacaatcaccttcggggtggttgttatgcttcttttattatcttcctgtggcggaaaacagaaagctatgggagaggctatcacagaacgtgattctcttccggtgatgactacattgggggttactacccttatttccgattccggagtgacacgttatagggtgaacacggaagagtggatgatgtacgaccgtaaaaagccttcgtattgggcgtttgaaaaaggtgtgtatatggagcagttcgactctatctttaacgtagaagccagtattaaggcagatactgcctattattatgacaaagaaaggctttggaagctgatagggaatgtggatatacagaaccgcaaaggagagcgttttaataccgaactgctctactggaatgaggccactcaaaaagtgtattccgacaagtttatacgtatccagcaaccggacagaattatcacaggacacggcttcgactcgaaccagcaaatgactatatataccattcgtaatattgaaggtattttctatgtggacgaggaagcaagtagcggtccgccccaaccggaaacaaaagcactgccggattcagtgaataaagatactgcgaaataggcgaagtcatatcattgtaccatatctcgtaaatcgtctgatcgtaaatcaaaacttatgaatatttatatctctctaattatcaccatggtcttttccgctttcttttcaggagtggagattgcctttgtgtcggtagacaaactgcgttttgagatggaacgcaaggggggaattacgtcccgcatcctttctatcttcttcaagaacccgaatgaatttatctctaccatgctggtggggaataatatcgcactagtcatctatggtattctgatggcacagattatcggcgataatctgctggcgggattcattgacaatcatttcctgatggtgttggcgcagaccgttatttctaccctgattattctggtgaccggagagtttttgccgaaaacaatcttcaaaatcaatcctaatctggtcttgaatgtttttgccattccgcttattgtttgttatgtggttctctatcccatctccaaattagcctccggcttgtcttgtattttccttcgcctctttggaatgaaggttaataaggatgcgtccgacagagcttttggaaaagtcgacctggactatttcgtacaaagcagcattgataatgccgaaaatgaagaagagttggacacggaagtgaaaatcttccagaacgccctcgacttctcgaacataaaaatccgcgactgcatcgttccccgtaccgaagtggtggctgtcgatttgactacctcgctggacgagctgaaaagccgcttcatagaatccggaatctccaagataatcgtatatgacgggaatatcgacaacgtagtcggttatatccattcgtcggaaatgttccgtgccccgaaaaactggcatgagaatgtgaaacaagtgccgattgtgcccgaaaccatgtccgctcataaactgatgaaactcttcatgcagcaaaagaaaacgattgccgtagtggtggatgaatttggcggtacgtccggcatcgtgtctttggaagacctcgttgaagaaatctttggagatatagaagacgaacacgataacacttcctatatcagcaagcagatcgacgaacgcgagtatgtgttgtccgcccgcctggaaatagaaaaagtcaatgagacgtacggactcgacttgcccgagtcggatgattatctgacagtaggagggttgatcctgaaccaatatcagagcttcccgaagttgcatgaagtggtgcgggtgggacgttatcaattcaagataattaaggtcacagcgacaaaaatagaactcgtgcgattaaaagtcttggaataatgacgataatcaagaaatttttagccaataaatagatgcatattagcattttttgtatcttcgtgcgctaaaacgacaaaagaaagaaataataataaacataaatcgtattaatcaaaatggcaacgttacaaaacattaggtcgaaaggacctctattggtgattgttatcggcttggcgctgtttgctttcattgcgggtgacgcatggaaggtgatgcagccgcatcaggcacatgacgtaggtgaggtgaacggagacgctctttccgctcaagagtatcagaatttggtagaagaatataccgaagtggtgaaactcatgcgtggggtgaccgccttgaatgacgaacaaaccaatcaggtgcgcgatgaagtatggcgttcctacgtaaacaataaactgatcgaaaaagaagcaaaagcactgggactgactgtttctgctgctgaaatccaggacatcctgaaagcaggcgttcatcctttgttgagacaaactcctttccagaatccgcaaacaggaaacttcgacaaggatatgttgaacaagttcctcgtggaatatgccaagatgagcgaatcacaaatgccggcacagtatgctgaacaatacaataacatgtataaatactggtctttcattcagaaaactctgatcgagagccgtctggcagaaaagtatcaggcattggtgtctaaagctcttctttccaatccggtggaagcacaggacgctttcgatgcaagagtgaaccagtacaacgtgttgatggctggtattccttactcttctgtagtggactctacaatcgtagtgaaagaatcggaactgaaagacttgtataacaagaagaaagaacaattcaagcaatatcaggaaactcgtgacatcaagtacattgatgtacaagtgactgcaagtgctgaagacagggctgctatccagaaagaagtggacgaagctactgaacagttggctactactacggaagattatacttctttcatccgctcgactggctcggaagctccttatgtagacttgttttataacaaaacagctttcccgtcagatgtagttgcccgtttggactctgcttcggtaggtactatttatggtccttactataacggtgccgacaatacaatcaactctttcaaaattgtagctaaagctgctgctgccgactctgtcgaattccgtcagattcaggtatacgcagaagatgctttgaagacaaagaccttggctgacagtatctacaacgcgatcaagggtggtgctaactttgctgatctggcaaagaaatatggtcagactggtgatgcaaactggctaacttctgcacaatatgaaggtgcacagatagatggtgataacctgaaattcatctctgctatcaacaatacaggtgtgaacgaattggtaaacttgccgatgggacaagcaaacgtaattcttcaggtaacgaacaagaaatctgtaaaagacaaatataaagtagctgttatcaaacgtgaagttgagttcagcaaagaaacttataaccgcgcttataatgatttcagccagtttatcgcagctaatcctagtgtagaaaagatggtagctaacgctgaagaagccggttacagattgctcgacagaatggatttgagtagctctgaacacaatatcggtggtgtaagaggtacaaaagaagcgttgagatgggcgtttgataaagcaaaaccgggtgatgtttccggcttgtacgaatgtggcgaaagcgatcacatgatggtagtaggtctggtaggcattaagccggaaggatatcgtccgttgaaagcagtacaggatcagttgagagctgaaatcgtaaaagacaagaaagctgaaaagattatggctgatatgaaagctgccaatgcaacttcattcaaccagtacaaagagatgactaatgcagtcagcgactctttgaagatggttacttttgcagctcctgcatacgtatcagcattgcgcagcagcgaaccgctggtaggtgcttatgcttctgcagctgaagtaaatcagttgagcgctcctatcaaaggtaatgccggagtatttgtattgcaggtatacggcaaggacaaactgaacgaaacattcgacgcaaaagcagaagaagctacgctgactaacatgcacgcacgttttgccagccgtctgatgaatgatttgtatctgaaagcaaacgtaaaagatacacgcttcttgttcttctaaacaagtagcaagtaatagatattaggcacggattacacggatttacgcggtttaaacttatgagggaaccgcgaaacccgtgtaatccgtgccttttttgtggtcgtttttttgtttatggtctttgttatctgattaaatttccatatcttgccaatctttatcaattggctttgcgaaatacttcattaactaatacgaatctatattatgactaaacaactagcccagtattcagttcccgctgaaaattcacgtgttatccgtgtattcctttcgtcaacgttcagagacatggagatggaacgttctgcattagtcaaactctttaagggtttgcaagtgaaggctgccagccgtggtgccaccatttcattggttgatttgcgttggggaatcacagaagaagatgcgaaaagcggcaaggttgttgaaatatgcctgaaagagatcgttaactcccggcctttcttcattggtatggtaggcgaccgctatggatggtgtcccagttatgaagatttatctcaaactctcaatgacagcttggaatatcgttggatagaagatgacttgaatcaccatttgagtgtgacggaaattgaaatgcagtttggtgtactgcgcaatcccaatccgttacatgcctatttttatataaaacagtcggcagatgataatctgtcttgccctgaagaggagtctcttaaattgaaacgtctgaaagagagtattttgcaacaggatcgttatcctgtgcaggagtatgattcgcccgatcagttgtgtaactttgtggaagctgcttttacggaattgcttgaacgggagtttccggatgtactgaccgttgaagataatcaagcattgcaagaacaactgacgcgcaatgaactcttattcaactatcacccaatacctgaagcagatcaggcgtttgctgattttttggcggcggatgaacaacggtgcctggtggtaacgggcggttgcggtcttggcaagagcgctttgttggctcattggagcgatttggtgaacaatgatatgccgatgactcccatctatcatcgcttggatagtactacattgtcttcttatccggaaacgttggcgagaatgttagcttccaaatgccagaacgcactcaagcatcaatctttgggtgaagaaaatttgttcgcggcggaagtttcaaaagaactggactcgacccaaagcactgccaaatccatcatggacgccgtgaaaaactcggttttgatgggagatgctggcttgaacactttttcagggaacacacttcgaaacctcaaggagattgaagaagatttgaattctatccaaaagttcagtcagttgtggagtgcgttgggtgcatcaagatatcctatcattttgctgattgatgacatcagttatctgaatccgactgaagcatccctgttttctttatttgcatctattcccccgaatgtgaaagtcgtgttgagcttttcggcgtcatccactgcttacctgccctttgttcagaatggctacgctcatttccagttgaatggcttttcacaggcggatgccaagtcgttctcaaagcaatatttgtctacttactccaaggctttgtctgcacagcaggaagatattcttgcttcgtgggtgctggctaaacaaccgcgctgtttaagtgtattgctcaacgagctggtttcgttcggtcagtacgatgctctcaatgaatatatgcgtggatattgccggctcaatgaggttgggcaattctatgacagtgtgctacggcgtttgtcggctgattatggttccgaagagattggaagaacgcttctgatgctttcacttactttagaaggatttaccgaagatgaagtgaagagcatggcagacattaatcagatactttggtcgcagttgagagtggaaatgagcagctggctcaccaacaaaggaggacgatattgcattggtgatacacaaatggtagaggcgatcgaacgctatttcgctcaagatgacgaatgtatagatgatagtcgccatgaaattatttccgctctgctggatgaggaagagatcctttcccatccgttgacttttgccgattataactatcgcatgaaacagttctgctaccatgattcgtatcgctataaagtggagattacctatcaatgctataagatgcaagaatgggatatattgaaggattggatttgtgatgtggagattttcgagattctgtatcgtacgaatcgttctctgttggaagatagctggaaggcgatcatgaacgacaatcctgaagttacgcctgaagtctatgccgaattggactttgatgagatcgattcttttttaattcctgtcattgctaatgatatggctactttcttgagcagttctttccatctgacgaaggcggcagctgctgtgagtgagaagagtatggaaggtgctgccatgccactcattgccaagtcggtattgaagatgaatgagggatgtcggtatgcccgtaatgaagaatacgaaacggcatgcgactgtttcctgaaagcattggtgatgcaggaaaacatagtaccgactccggaactggagattgccaacacctgtcgaaatctagctttggcatattactacaatgagcaatacaatgaagcggcgatctatttgaatagggcgcttgattatcatgcggcttctgctgacgagaagagtcaggcagaagtcattgaactttccgaatatctggcttattgtgattactataaggatgaggaagagagtgctgccgagaaattccggaaagtagctgaaatgcacgagtcattgaatggcagactgtccggtggagtggctaaatgtttgcgtatgcagggtaaatgtctttattatatcaaacgatacgatgaagcatggatgctgatgaatcaggcgttggacattgctatacagatagatagcaaaaaacagatcgtcgcttgtcataaacagttgtattatctgtgcagggaattcaaacggatgatgaatgaacgtggcgatgagcaggcatctactttattcttccgtgagtctcttctgcatgaaatgtatttcagcgaaaaaccgcgtctggcggaactgactgtccgctatgaagcattgagatgtgatattatgcagcagtattacatgaataaagactatgataacgtgattcgtattgcaacgtctttggattttcacgatgatactgaccctaatgcttcctgtctggtatattattacaaagcacaggcttatgtgaagttggagaattatccaatggcgaaagaggctttcttcagagagttcgaactgcgaaagaagtatttgggatgggaggaagaagatacgattctggcttgtcagaacttaggggttttgcacagcttttgtaatgaacgggaagaggcgctggcttgtttccgtgaggcgtacggtcatgaagtgaaaaagaatggcgaggattctgaaatggcgcaaaagctacttcaatatatcagcgtggttgaatcataacggaggcatacttcccttttttgttaacttttacattcctgctatacggaaatcgactttatttccttacatttgcagatataaactatcaacagaaagaagaatgtctaaatatccccttttaggaatgactcttgtagagcttcaatcattgacaaaaagactgggtatgcccggctttgctgccaagcagattgcatcctggctttacgaaaagaaggtagcctcgattgatgatatgactaatttgtcattgaaacaccgggagttgctcaagcagaactatgaggtgggagcggaagctccggtagatgaaatgcgctctgtagatggtacggtgaagtatctttataaagtgggtgagaaccattttgtagagtcggtttatataccggatgatgaccgggcaacgttgtgcgtgtcgtcacaagtaggttgcaagatgaactgtaagttctgtatgaccggtaaacaggggtatacggctaacctgaccgccagccagatcataaaccagattcattcgctgccggaacgggacaaactgactaatgtcgtaatgatgggaatgggcgagccgctcgataacctggatgaggtattgaaagcattggaactactgaccgctacctacggttacgcatggagtccgaagcgtatcacgctttctactgtcgggttacggaaaggattgcagcgttttatcgaagaaaatgactgccaccttgccatcagccttcactctccgctgaccgttcagcgtgctgaattaatgccggcggaaaaggcgttttcaatcaccgaaatggtggaactgttaaaaaactatgattttagtaaacaacgtcgactttcgtttgaatatattgtttttaaagggctcaatgattcgcaggtctatgccaaagagttgctgaaacttcttcgcgggctggattgcagggtgaatctgattcgttttcatgccataccgggggtagacctcgagggggcggatatggatacgatgacccgttttcgtgattatctgacatcacacggacttttcaccactatccgttcatccaggggcgaagatatttttgccgcttgcggtatgctgtcgacagcgaaacaggagaaaaataatgaaagttaatatataaaaccgaacatcatgaaaaagtattcttttattttatgcatcgctttggtagcctttgtcgttgcatcttgtggtctgaaaggaaatcacacctctagtggtcgtgcttacgagcttttggttgtagtagatcacggtgtttgggatcgtgctgccggaagggctttacatgatgcgctcgatgctgatatgcccggtttgccgcagtcggaaccttctttccggattatgtatacttcgccgaaagattatgattctacgctgaagttgatacgtaacattattattgtagatatacaggatatatatacgaaagcctcgttcaaatatgcgaaggacgtatatgccaatccgcagatgatattgactatccaggctccgaacgaagaagagttcgagaagtttgtggaagagaacaaaaagacgattgtcgacttctttacccgtgcggaaatgaaccgtcagattacgttcctggaagggaaacacagtaatttcatttcgcagaaagtggacagtttgttcggatgcgacatctgggtggatgccgaactggctaattcaaagaccggggatgatttcttctgggcttctaccaacacaggtactgccgaccgtaactttgtgatgtactcttatccgtacactgacaaggatacgtttaccaaagaatattttgtgcacaaacgtgactccgtgatgaaagccaatatccccggattcaaggaaggcgtttatatgtcgaccgatagtttgctgaccgatgtccgtccgatcaatgtacagaacagctacacaatggaagcacgtggcctgtggcgtatgaagggcgactttatgggtggtccgtatgtgtctcatactcgtctggacgagaaaaaccaacgaattattacagcagaaatatttgtttattcacctgataaaatgaaacgcaacctggtacgccagatggaagcatctctgtatacactgaaacttccgaatgaagttcagcagaagcagattccattgggagaagcatctaaggaagcggaacaaactaataaataaaaacatggaagataacaagataaggataggtatcacccaaggagatattaacggggtgggctatgaggtgattcttaagacattttccgaccctacgatgttggaactatgtactccgattatttatggctcaccgaaagtagcggcttatcatcgcaaagcgctggatatacagaccaatttcagcattgtcaactctgctaccgaagcggggtacaaccgtttgagcgtggtgaactgtacggatgatgaggtgaaagtggaattttccaaacccgatcccgaagccggtaaagctgcgctgggggctttggaacgtgccatcgaagaatatcgcgaagggttgatagatgttatcgtaacagctccgatcaacaaacatacgattcagtcggaagagttctccttccccggacatacggaatatatcgaagaacgtctgggcaatggtgataagtcattgatgattttgatgaagaatgacttccgggtggctttggtgacgacacatatccctgtcagagagatcgcgactacgattaccaaagaactgattcaggagaaactgatgatattccatcgttgtctgaaacaggatttcggtatcggcgctccgcgtattgcggtgctctctctcaatcctcatgccggagacggtggtttgttgggaatggaagagcaggaagtgattatccctgccatgaaagaaatggaagagaaaggaatcctttgctacggtccttatgcggccgacggctttatgggttcgggcaattatactcattttgacggtatcctggcgatgtatcacgatcaggggctggctccgttcaaggccttggctatggaagacggggtgaactatacggcaggcctgccggtagtacgtacttctccggctcatggaacggcatacgatattgcaggcaagggattggcttgtgaagattctttccgtcaggcaatctatgttgccatcgatgtgttccgtaatcgtcagcgggaaaaagtggctcgtgccaatccgttgcgtaaacagtattacgagaaacgtgacgatagtgataaactgaagctggatacagtagacgaagattaaaaacgagtgatgacgagagcagagatacaacaagtgaaacagcgtttcggtattattggaaatactgaagcattgtcgcgcgccatagatgttgccattcaggtagctcctaccgatttgtctgtgctgattaccggagaaagtggagtcggaaaagaaagttttccgcagattattcatcaatatagccggaggaagcacggacagtatattgctgtcaactgtggtgctattccggagggcacgattgattccgaactgttcgggcatgagaagggtgcgtttaccggtgcgattggcgaacggaaagggtactttggcgaagccgacggtggtactattttccttgatgaagtaggggagttgccgatgtctacccaggcacgtttgctccgtgtactggagagtggcgagtttatgaaagtaggttcgtccaaagtacaaaaaacggatgtgcgtgtggtggcagctacaaacgtcaatctgacgcaagcgattgcagaaggacgtttccgtgaagatttatattaccggttgaatacggtgcctatccagataccgcctttgcgtgaacgtggtgacgatgtacttttgttgttccgtaagttttccgcagactttgcagagaaataccggatgcctgttattcagttgacggaggatgcgaagaaagagttgttggcttacccgtggcccggaaacgtgcgtcagttgaagaacatcaccgagcaaatatctatcattgaaaccaacagggagatttctgctgctatcttgcagaattatcttcccgcacaaaatacgcaacgtcttcccgcgctgatgggaacgcgtgagagtaaaagctttgagagcgaacgggagattctttattctgttctgtttgatatgcgccaggaagtggcggagctgaagaagatggtgcacaacctgatggcggaacgtgccggacaggtggggcaggtaggacaagtgggaacggtggttactactccggtagtgacgacacaccagccttcggtacctgcgatcattcataccatgcagcctgcggtttgcaaggatgacgatgacatacaagacacggaagaatatgtagaagaacctcctttgtcactggacgaagtggaaaaagaaatgatacgcaaagcacttgaaaggcatcacggaaagcggaagagtgcggccaaggacttgaatatttccgagcgtacactttatagaaaaataaaagaatatgaattggattaagaaaataatacgccctttgctactgttcggcttgccgttggtagtcattgcgtgcactgtttcctataagtttaacggatcgtctatcaattatgataaggtaaagaccatttcgatagccgacttcccgatcaagtcggagtatgtatatgctccgttggcaaccaaattcaatgaggacctgaaagatatcttcattcggcagacccgtctgcaactgctcaagccgaatcagaatgccgacttgcagattgacggagaaatcacagggtacaatcagtacaatcaggcagtatctgccgacggttattcttcggagacgaagttgactatcaccgtcaatgtgcgttttgtcaacaacaccaatcatgccgaagactttgaacaacagttttctgcgttccgtacctacgactctacccagttgttgactgccgtacaggacggattgattgctgaaatgtctaaagagatcaccgatcaaatttttaatgcaactgtagcaaactggtaatataaatgacttctgttaactttcaacaatggattcagcatcccgagacgctgaatagggatactttgtacgaactgcgcaatcttcttgcgaggtatccgtattttcagtcacttcgtctgctgtatctgaagaatctgtatattctccatgatattagtttcggtggagaactgcggaaagcagttctttacattgcagacagacggcagttgttccggttgattgaaggtgaccgctatgatgtgcaggcacggaaaaagggagtacctctcacggaggtgctgaaagacgaaccgtccgtagaccgcacattagcattgatcgacgctttcttgtccacagtacccgaagaggtgactgcccggaccagtttcgactattcgatggattacacctctttccttttggaggagactccggccacggaacagccggctgaagaaacgcccaaactcaaaggcttcgaactgattgacgactttatagaaaagagcgagagcgactctcccctctgcatgaaacctttaagagaagaaatgccatcttcgccaacctcttcggacgaacttaccgaagaagaaacgatgaaggaagaagaggaagatgacagctgttttacggaaactttggcaaaaatctatgttaaacagcaacgatattcaaaagctcttgaaataattaaaaaattaagcttgaaatatccaaaaaaaaatgcttactttgcagaccaaatcagatttttggagaaattgattattaacgctaattcaaaataactaaaaatgtacttattattcgttatcttaatggttattgcagccttgttgatgtgtttcatcgtgctgattcagaactcaaaaggaggcggacttgcttctggtttctcttcatctaacgccatcatgggcgtgcgcaagactacagactttctggaaaaagcaacatggggcctggccatctttatggttgtaatgagcattgctactgcttatgtagttcctcgctctgctgttgctaaagacgcagtgttggaacaggcacagaaagaacaacagactaacccgtataacttacccgcaggtacggctgcgccgcaaactgaagctcctgctaccaatgcacctgctacagaaactccggcaccggctactgaaactcctgctcctgcagcagagtaattcactccgtcgtcaggtaagactttggggtaaaaccattaatgggaaggtgcagacggatgctgcatttctttgatatttaagtgcggattacgcagattacacggattttcaatgttccgcgtggtcagtgtaatccgcacttaactttttcttgtaaaaacaatctctttgtgatagaaacaaacgagatttaactacctttgttggctgtataagattattaactacttttttaaatataacaatgacagaacatttgaaacagaaattgaatgactccgccgtactccgatggagtgttctagcattggtcgcatttactatgctatgcggctatttcctcaccgacgtaatgtctcctctaaaacccatgcttgagaaagaactactatgggatagtcttgattatggtttcttcacaagcgcttacgggtggtttaatgtattcctattgatgctgatcttcggtggtatcattttggacaaaatgggagttcgtttcaccggaatgggagcttgcttattgatggtgtttggttgtggattgaaatactatgcgatttctactacttttccggaaggtgccatgctcttcggattcaaaacacaggtgacgttggctgcattgggatatgctatctttggtgtaggtgtggagattgctggtatcactgtttccaagattatagtgaaatggttcaagggcaaggaaatggcattggctatgggacttgaaatggctacggcacgtattgggacaactctggcgatggtgttgacagttcctttggcagacttcttcggatatacggacgagggtggtgcattccataccaatattcctgctcctattttgttttgtctgattatgttgtgcgtgggtacgattgctttcttcctttatactttctatgataagaaattggatgcttctttggatgcagaaggtttggaaccggaagaaccgttccgtatgaaagatattgtgtatatcattaccaataagggattctggttgatcgcattgctgtgcgtattgttctactcggccgtcttcccttttatcaaatatgctgccgacttgatggtgcagaaatataatgtagatccgaaactggcgggaacgattcccggattgttgccgattggtgcaattatcctgactccgttgttcggttcgttatatgaccgtatcggtaaaggagccacattgatggtgatcggatcattgatgctaatttttgtacataccatgtttgccctgcctatactgaatatatggtggtttgctactattataatgattatattgggatttgctttctcattggtgccttcggctatgtggccttctgttccgaagattattccggaaaaacagctgggtactgcttacgctttgattttctgggtacagaactggggcctgatgggtgttcctttgttaatcggatgggtattgaatacttattgcaaaggtccggtggtagacggtgcacagacttatgattacacattgccgatgactatttttgctctctttggtgtacttgctctgattgttgctttgatgttgaaagcagagaacaagaagaaaggatatggtttggaagaggcaaatatccagaagtaacagttacaattcgaagtaacgttataaattcgagagtataaggtttgaaaataaaagagggttagtattaatgctctgaaataaaaaaaagaattatggctgccaaagagaaaatcaacctgttagaggtcattccctgtcgcagtgaacatattacagcagaaagggaaggggagacgattgtgctctcctttccccgttttaaatatccgtggatgcaacgcttccttgtaccggcaggaatgtcgaaagaacttcatgtgcgattggaagaacacggtacggctgtatgggaactgatagatggaaaacgtactgttcgtgaaatcatagaagaactcgcagatcattttcaaaatgaagcgggatacgagtctcgtgtatcggcttatctttctcaaatgcagaaagatgggtttataaaactttttattaattgactttattagatgataggtgataaatgatagttactatgcggcataatagctagttatatgatagtgcagcctcctaaggaggtttatcaaatatcccgtttaaagatatgaaaaaaggcaactgattcgtaatgatgtagttacctttttagtattttgagaatatctttagttacttatatttcttatttactgaatatcccttatcatttaggaagcatctcccatctatcatttatcaactatcatctaataaattatctaattaaggaaaatagcccagaatatcacggcagttgcaatgaggactcccatgataataagcgtcccccaaacgaaataattgctgtccttttctttctttttctccgagtcgtggatgatacgtcccatttcctcgggagtggtgttgggcagtggataaggctcgttggtgcggtttaagtgcttcagtttgtcgttggcacgttcacggcgtagacgggaagcctctcgcccttcgctaagccgacgtatcatgtcgagcatgtgtccttcaccacccatattctttgccctttagaagtttactatttgccttcttctctatccacttttaacaatcctcccgtattcggatcaaaataaactttgattgtagaattcttattgaataagacaggagccagatattctatcacaccgaattgagtaatagggagttcaccttcgtaaagtttctttttaccgtcggtcaatgtaaccattgcttgtccgggcacgttgtaggcgattccatccaaatctttcttcttcttaccgtcttcctgtgggatcttgactgatttcaggtctttcaagctgatataaaacggagttcctgctagatcattgttggcaactacacccagtttcttggagaagcggaaagcaacttcgttgttgaattccctgtccggagtaaggcggacggtgaatgtcttctcttccttatcacgagtgccggagaacatttgcgtcattgcttcttcctgtgcattcagattatcaagcataattttaagctgtgctccgtctgaaggcatattgtcagcttgtccgcgcaataaggcattcttgctttcgcggatgttatagatctctttagccaccagttcagccatcttcgcggtagagctggccatcagaatttcttcggtcaggaattcgcggggattcgctatttttgagaggacagtgggagcaggagctgttttcttgtctgaactgcttttactgtaaggcacattgatggttttcacgatgccgtcctctgtcagttccatgagtggtgctactgttttatccttcaattttacgaagtaagtagtttcgctgttgggtacacctacggatttcaccttcacactagccagttcccaatactcttcgggttcggtggagacgttggtcaatcgcaggtaacgatcagcgtatttgctgaattctcctggagtatagttgactttgttggcttttatttcaagctctatttgggttttgggaagactgtagactactccgtaatcttttccccgggtaacccctgtcagtacttcggtttgtgcataggcggacgttgtcataagtagtcctgctgctataatcaactttttcatattcggttctttttaactggttttgaaaacaaagttaatgaagttattgaaaaaactgtaagttcttaacttttattcgcttacaagtcgccatgctgtcggcagacaggtgataatatcgcttgcgatcattccgatcattccttgcttcttttgagcgacatcgcccgccaatccgtgaatgtaagtgccgattttagcggcttcttcggtgggataaccttgggcaagcagcgccaggattactccggtcagtacgtcaccgctacctccggttgccattcccggatttccggttgggttgaagaaacatttaccttcgggggtgatgatggcggagtaggctccttttaaaataatgtggacatgggcggcacgggccagttcgcaagccttcatcagacgttcgtaagagtcctggcatttgccggtcagacgttccagttctttcggatgcggggtgaggatggaacccttcggcaggtgggtaagggtatggcggtggttggcgaggatattaagagcgtcggcatccactacaacaggagtctggcagtgttccagttgctccaacaaggcagcttccgtttcctcgtttcgtcccagtcccgggccgatgccgactgcttggtagtcgtccgtatcggtaggtacggcaaaacaggtttcgttgatgtcggtttctacgattgcttcgggtatggaggtctgcaagatgtcgttgttgcacattggtgcatgaacagtcagcaaccctactcccgaacggaggcaggcgcgggcagcgagaacagaggctcctgccattccttttgaaccggcaatcaatagtgcatggccgaagttccccttgtgggcaaactgtttgcgtggcttgatgagtgaacggatttcttctatttccaacatttcgtagttagtctccatctcttcaataccgtcttcgcttaattggatatccagcacttcccattctccgacaaattcagtgttctctgcgaaaagaaaggcgagcttcggcagttgcagactgaaagttacgtcggcgcggataatattagcttttacgttgaatgtattttcttctcccatcagtccggaaggaatgtcgatggctactaccatggcaggggaggaattgatgtatttcactacggcagcgaatccaccgctcaacggtttgttcagacctgaaccgaataatccgtcgattaccagatgatcgggcgtcaggacgggaggtacgaattgggtactgatttcgtggaattttacttcttccatcatttctaccagttctttattggtctggcagtcgggtgaaagttctcctttcgtgttgaagagaaatacctcgattttatatcctttttcagccatcatgcgggctacggcgagagcgtctccgccattattccctggtccggcaaagatagtgaccggcgtttccgtattccatctgtctgtgatggcttttgttaatacggttgctgcacgttccatcagatcgattgatgcaataggttcgttctcaatggtataagcgtccaatttcttgatactgctgcttggaaatattttcattgcgatgttcttttagttttcggattacaaatgtacatgattcttctgacttttcccgtttgttgtgggaagaaaaccataattgcaacttttaattcatcattagttctatcttttggtcaaagaaatatctgcttttgaactattaagtgttagaataactccgccaaaaaataattcaatgctgcaccattatgaacttacttttatttctccctgaaaaagatttctggttcttcgtcaaatttggtggtaatctcttttttatttcaactgtcttcttctttcttaatcctattaaaagttgtagatatgtttgctttttagtaactttaaagacaccacatcattaagagttacaatgcaacaagtcatatctacaacgtacaaatatacatcaaaaaaagaaaatgctcctacaaataggggattattccatgatttcagattcagtcttggctacgataatctgcaacaagatggtatctctgaagctgttggctcattgacggtctttctacatacggctggcaaaggggcttcctgtccttattgcggacatttcagtcaccgattgcacagttactactcccgtcatattgaggatcttgaagtttacggtcatactttggagttagtcatcaaggttggcaaatattattgtgacaatgtttcttgtccacaaaaaatattctgcgaaccgttgtcttttctggctcgtcggtatggtagacggagctatcttgttgaggaacgcatcagatcgataagtttggaacttacttcccgaaaggcctcttctcttttgcaactgttccatataacagccagtagttcttcctgcttacgcatcctacaacagtgcggacaacacaatcctatgcataataaaagtatttatgtaggtattgatgattttgcctataaaaaaggtaaggattatatgagtgtggccgtagaccagatgacacacatacctattgctttgttagaggatagaaacggagaagcacttgataactggctcatccggaatcctcaaatacaatatataacgagagaccgtggaagatgtttcacagaggctataaacagaataattcctggtgttacacaaatctgcgaccgattccatctaatcaagaatatgacggacacgatgataccggaaatagagaaaataatccgtcagaccaagaaaaagctcaaatacgaatatcctgacagagacacggcttcttcgttaattcttcaggacatatttaacatgggagatgtccgacacagagaaaaattgaagatatacagggaaagcttgaacttaaaaatgcaggggatgaccattgagcagacagccacacatttgggtaagaaaagtcgctacatttataagattattcacaacagaagaataggggcatacttgaatgagcaacagaagacagctcttaaacatgtatccgaactggctacaatcattagtgcgggctgtattactcgaaaaatattggcacaaaaaatggggagtaaaatcagtggcgcacttattggaaggataacatccagcttgcgaaaaaggtatcaacaaaagaggaaggaagtcaaggagcataatgagagcattgaaaacagaagtaaaatacagagagtttcacagaatcagatacgcaaatacattctaaagggagaatcggataatcctaaactagcggaactgtataagtcctcaccgcagattaaagaacttttaagcgtgtgtcagaatttcagagatatgattaatgggaacacttatgataaggatattagaaagtggattgaaaaagcgaaggcaacacggaatatggcactgacgaactttgcatatggtattgaaaaagactgggaggcagtacaggcagctattgatatccccttcagtaacggattactggaggggacagtgaataaaattaaagcggtaaaaagacagatgtacaatagggcaggaattaaactactgagagcgaagattatttattcacaatagaagaagtaccaccaaatttgacgaagaaccaaaaatctttttctgtagaggggcggatggaaattgtgtttagtttatctccataccttcttaaacaaatttttaatgcggttcccctgattaagcctttgattatttgccgtttccgataaaaatgttatctttggagatagataatgtgcatcacattaatttcctgtgctcacaatgaattagaatctaaataacggattgtttaatcttctaaagtttgcatgatggaaaagacaaaaattggcttgaatgccgggaaagtatggcgcatcttaaatgaaaaaggtgaactttcaatgttcgatttgtgccgtgaattaagtttgacgtttgaagacgtagctcttgctattggttggctggcccgagaagacaaaatctttttgaggaaaagagaaggaatgctttttgccagtatcgaaaatgtcgaatttacttttggctaaggtggtagctaacctatatttaagatggatctccactttgttatttacacagctaaaaaaataatgaagtggatcagtaggattttttatgcccatttttattattccccctatattcccgtttgataagaactttctttttttgaagcatttaatctatttttcgtacctttgcaccccataaactactaaacacataaattcatgagtgcattgaaagggcatccgaaaggcctttatctgattttcgcgacaagcacggcagaacgtttcagttactacggtatgcgtgcgatctttattcttttcctgacgcaggcattattgtttgacaaagaagcggcagcatccatttacggtagctataccgggttagtctatttaactcctttgattggcggatacattgccgataaatattggggaatccgtcgctctgtgttttggggagcaatgatgatggcagtcggacaattcctgatgtttatgagtgcctctactttagataatacggaacttgctcactggatgatgtatggcggactcggattcctgatcttgggaaatggttgtttcaaacctaccgtttcttctcttgtaggtcaactctacgaaccgggagacagacggctggatgctgcatataccatcttctatatgggagtgaatgtaggttcttttgccgcccctttgatttgtggttatctgggcgataccggtgacccgcacgattttaaatggggatttcttgcagccggaatcatgacactgttcactgttgtactttttgaaactcaaaagaataaatatcttttctctccttccggagagccaatcggtattatccccgatgccaaacgtgaaaagaaagaggataaagccgagcatatctcacacccgaagatggataagcgtaccaagttgcgtaatacccttgtaatcactattcttacagttgctttaatagccttctttaattacgcttttgagggtgactgggtgagcatcggtatttttaccgcctgcattgttttccctgttctcatcctattggatggttcattaaccaagatcgaacgtagtcgtattttcgttatctatatagtagctttctttgtcattttcttctgggcggcttacgaacaggcaggagcctctttaactctctttgcctccgaacaaaccaatcgtgatattttaggttgggaaatgccggcttcgtggtttcaatccttcaatcctctgtttgttgttgtcctggcatatataatgccgggtgtgtggagcttcctcaacaaacgaaagatggaacctgcttctcctaccaaacaagcgattggcttgttacttctttctttaggttatcttttcatctgtttcggagtgaaagatgctatccccggagtgaaggtaagtatgatttggctatcaggactttattttattcatacaatgggtgaaatagccttgtcacctatcggactttcaatggtaaataagttgagtccgctacgtttcgcctctttgatgatgggaatctggtatctgtctactgccacagccaataaatttgcaggcatgttgagtggactttatccggaagccggaaaagtgaaatcaatctttggttatcagattgctaccatgtacgatttctttatggtattcgttgtcatgtccggtgttgcttcattgattctgttccttctctcgaagaaattacagaagatgatgcacggggtagaataaaaaatcgtatttttgcaaggttattttttaaattaccggttatggataccattcagataaaagacaaacagttcactgtttctattaaggaacaggatattcagaaagaagtgattcgcgtagcgaacgaaatcaaccgcgacttggcaggtaagaatccgctcttccttagtgtgttgaacggttcatttatgtttactgccgacttgttgaagcacatcaccatcccttgcgagatttcgtttgtgaaactggcttcttatcagggagtgacttcctcgggagtgattaaggaagtgatcggactgaatgaagacattgccggacgtacagtagttattgtagaagatattgtggataccgggctaaccatgcaacgcctgttggatacattgggtacacgcaaccctgaagcaatccatattgcttctctgctagtgaagcctgaaaaactcaaggtcaatctgaacatcgaatacgtagcaatggaaatcccgaacgactttatcgtaggttacggactggattatgatggtttcggacgcaactatcccgatatttatacagtagtagattaaacagttaatattaaataggtaccagtttaaatggtaaatagtaaatcgttaaattgtaaataacaaaatgttgaacatcgtaattttcggtgctccgggttcaggaaaaggaacacagagcgaacgtattgtagaaaagtatggaatcaatcacatctcaacaggagatgtattgcgtgctgaaatcaagaatggcacagaattgggtaaaactgctaaaggttacatcgaccaaggtcaattgattcctgatgaattaatgattgatattctggcaagcgtattcgacagcttcaaagatagcaaaggtgtaattttcgacggtttcccaagaacaattgcacaagctgaagcattaaagaaaatgttggcagaaagaggacaggatgtttctgtaatggttgacctggatgttccggaagaagaactgatggtacgtctgattaaacgtggtaaggattccggtcgtgctgatgataacgaagagacaatcaaaaaacgtctgcacgtatatcattcacagactgccccactgatcgactggtacaagaacgaaaagaaataccaacacatcaacggcttgggtactatggaaggtatctttgctgaaatctgcgaagcagtagataaattgtaatttagtaatcttactaattatcaatacactattataaatgaataagtcagtcagtagccggagtattctacttaattactctaactactgactactttaactacttaaaaagaatatggctgaatcgaattttgttgattacgtaaagatatactgtcgctcgggtaagggcggaagaggctctacgcacatgaggcgcgagaaatattgtcctaacggaggtcccgatgggggcgatggtggaagaggaggtcatatcatcttgcgcggtaaccgtaattactggacattgctgcacttgaaatatgaccgtcacgcaatggccggtcatggtgaatcggggagcaaaggacgtagtttcggaaaagacggtgcggataaagtaatagaagtgccctgtggaacggtcgtttataatgccgagacaggcgaatatctttgtgacgtaacagaagacggacaggaagtggttttgctcaaaggcggtcgcggtggtcagggtaactggcatttcaagacggcaacccgtcaggctccgcgttttgcgcagccgggagaaccgatgcaggaaatgaccgttatcatggagctgaaactacttgccgatgtcggtctggtaggtttcccgaatgcgggtaagtcaactttgctttcttccatttcggctgctaaaccgaaaatcgccgattatccctttactacgctcgaacccaatctgggtatcgtttcctatcatggtggaaagtctttcgtgatggcagatatacccggtattatcgagggagccagtcagggtaaaggcttgggactgcgtttcctgcgtcatatcgagcgcaattcattactgctgtttatggttccggcagacagtgacgacattcgtaaggaatacgaagtcttgctgaacgaactgcgtactttcaatcctgaaatgttggacaagcaacgtgtgttggctgtcaccaagagcgatatgctcgatcaggaattgatggacgaaatagaacctacattgccggaaggcattccccacgtattcatatcttctgtttccggtttgggtatctcggtgttgaaagacattctttgggaagaactgaataaggaaagcaataagatagaggacatcgttcaccgtccgaaggacgtaacccgtctgcaacaggagctcaaagacatgggcgaagatgaagacatcgtttatgaatatgatgacaatgttgatgatgatgacgatgatatcgactatgaatacgaggaagaagattgggaagaaaaatgatttcacttacaaaaaataatgagttgaagggatataagtcactggatgtatatcctgaggtagctcatttcgtaacaacgcgtcacgaaggtataagcaccggagcttacggctctttcaactgttcgccttataccaacgactcatgcatgaacgtcaatcgcaatcagagctggttgtttcagtgcatgaatcatcagataaaggagttgtttattcctgaacagagccatggttgtgccagtctgattatcaatgaatcattttttaaagagtcattagaaatgagacggctacttttgcgaggaatggatgccttgataactaatgtgccggggtattgcgtttgcgtcacgacggcggattgtgttcctgtattgctgtacgacaaaaaacaacacgttgtggctgccgttcatgccggatggaaaggaactgtgaagcatattgtcagtcatgtgatggatcacttgaatcagaaattcgggacgcaaggcgaagatgtggtagcttgcatcgggccgagcatttcgctcgaatcatttgaagtaggtgatgaggtgtatgatgcttttaaagaaagcggtttcgatatgtctcttatttctatgaagaagaaggagacgggcaaatatcatattgatttgtgggaagccaaccggattgaattactgaatgccggagtgcctgcagaacagatagaagtagctggcatctgtacctatattcatcatgatgaattcttctccgcacgtagactgggaatagattccggtcgtatcttgtcgggaataatgattagaaagtaataattggtgtccgtaattgcaggacgctgatgattggtttatgataagttatgtttgaaataaaagtatctaaagaaataaaagacgcatgcccggttttcgccggagccgccgtgtatgctgcagtgaagaatactgcttacagcgaaggtctttggcaggaaatcaacgcttttaccggacaactgacttccacaacacggatggaagacatcaaacatcaacccgttatctttgctacccgtgaggcttataagcgttgtggcaaagaccccggacgttatcgcccgtcagccgaagctctacgccgccgcctgatgcgtggaatccctttatatcagattgatacgttggtagaccttatcaaccttgtgtctcttcgtacaggacattcgatcggtggttttgacgcggacaaaatacaaggtacgcaccttgaactcggtatcggcaaagctggagaaccgtttgaaggtatcggacgcggtgtgttgaatattgaaggattacccgtatatcgcgattcattcggaggaatcggaacaccgacaagcgatcacgaacgtacgaagatggatctcggaactactcatatcctggcgatagtcaacggttataatgggaaagatggtttgcaagaagctgttgaaatgatacaaaccttattaagaaactatacagaatcggatggaggcgaaatcgtattcttcgaataattagaatgagtgctctaagaaaaaagacatgaaaaacatacttatcttactgacagttttattattgccactgactgccgacgggcaggataaaccttccttctctgcccgcgaaatggctgatgtacgggtaactactcccgggttatttgctaaaagcaatcatatctatctgcatttggattctctgaaagaccacgaatatgcattcccattacccggaggaaaagtaatctctgcctatggaactcgtggaggacattcgggaacagatattaagacctgtgcaaaagatacgattcgtgctgcttttgatggagtagtgcgtatgtcgaaaccctattatgcctatggaaatatcgttgtaatccgccacgctaacggattggaaacgctttatagccacaatttcaagaatttggttaaagctggtgatgtcgtaaaagccggacaagctatcgggctgacaggacgtaccggtcgtgccactaccgaacatgtacacttcgaaacccgtattaacgggcaacattttaatccgaatctcatttttgatttaaaagagaggacattgcggaaagaacgtatcaagtgtaccaagaacgggagtaaaatcgttgtgaagacgcatactcctgatagccggattgcccagagtaagaagtaacttattgcacaaaccgtatgcagaccggcttgtctactttaatatcctgctgtacatctgttaatagtcctgtatctgcatctctttcatagacttgtatcacattgctgtctctgcaagcaaccaataagtatttgccattaggtgtaatgatgaaattgcgtggatgaattcctgtcagttggtagcctgcttttgacaacattccgttatccgggtggatattgaatatagcaataccgtctgctttcaaacgattgctggcatacaggaattttccatccgggctgatatgaatgtcagcacttccttgtgcgtttaccgtgtcggcagcgattgtttgcatctcttttaaatctccgtctttgtattcaaaggcgattactgtgcccgataactcattaatcagataagcataatggccgtttggcgagaaagtcagatgacggggacccgaaccggctttcactttaaaggcagcaggcgatccttctttcagaaatgcttctttattctctgtatttgcagtggggttaatgataaacttatgtatttggtctgtacccaagtcatcggcaaacaagtatttaccatctggagtgatacggacacaatgcagatgcggtttctcttgtctttccttgtctactcccgcgcctttgaattgtataatatcggaagtgggtaggagtgaaccatcttttgcgatagggaatacagaaatgctgccaccactgtagttggcagttatcacattattttcactggcaatgatatagcaaggatcttcacctcccgtttgctgtgaatttaataattccaaagtacctttttctttattgaaagcaaatgcattggcagcagcttgttcattattgaattcactgactgcatagacgaattttccgtcggcagacggaacaagataagaaggattttcaatttccgtttcacttaacggagtagcagtcccgtctttttcgttgaagcggtagctatatatccctttactggttcctgatgtgtaagtacccaccaacatggttagttcgtttttcgttgtatcggttgtttccataggagtcttttttttagaagtacagccactgatactgattccgaatatgcaaacagcggcaaatgctttgaatatagatgttttagatagatatgtcttaatcataagtagcttattattggttgatttttcatgatgctttttcaccttaaatataaaatagctccgtaaagataatgctttgatataatatttgctaacgtcttctcgtaaattagaaaacatttcctatctttgtgcccttggaaagcgttctaaacaatcgctattctgtacgaataaaaatttggggttgactggatttgacagcgggcagaaatggtaggtaagcatgcagtgggtcggtaatttccacttaaatatcagttatcaaaattttatctggcgaaactaattacgctcttgctgcttaatcgaatcacagtagattagcttaatccaggcactaggtgccaggacgagacatcactcggaagctgttgctccgaagcattccggttcagtggtgcagttacatcggggatagtcaaaggcggcctcgcacttttgatgaaactttagaggataaggcaggaattgatggctttggttctgttcctgcacgaaaatttaggcaaagataagcatgtagaaagcttatgatttcctcgtttggacgagggttcgattccctccagctccacaacattataatgaaaagaagaatcctgtaatcaattgaattacaggattctttgtttgtaaatgattgaatgaaagaaaaatgctttatatgataagcaatggaatgctttcttaggtcaacaagaatatttattgcatgacattgcgctctgaaaggaactgtcagagcaggatatttactgctatgttgtctatatactctcgttgcttattcaggaattcagcctgaaggagttcattggactgcgatatgacggtgcaatacttcttcagagaatctatccacaatttgtgtctggctgtgatttccttattccttgtatatatcgggtaaccatagtgatgccagaaagcagattcactactgtcatcccatgtcgcataagtagtggtactattgatgtataacactgatagataaatttcaatttgagttccggtggtattaatacctttatttatagttgtttctatatcatccaaatatttgtgcagctctaccttgagcgtatccaattctatctcgttcaacagtcctctcacatagaaatattgcatttcctttatcagattaagaaacaggttattatcaactatgagagacagctttcttattttagtattcaggaagctcattctttcgcagctttctttaatctctttgggaatgactacctccgaatatagatagttcagtggtacatctgtcatttgatgcatccatcggtaatagataaatttgaataaatgttcatagtttataaacatggtgtgcagaaaatgatttagtgtgcaggtgatttcggaattctccgagtcaatcaagcgttgcaggtagctttcatagtagcgaaaaaactccagaagatttttgcttgggttttgtctgattgtacctatatgattgaatgcagcggcatcacttttatcattactgataatctcatccagtgaaaagtttaacaccagcgatagtttatagatctcttccatagagaacggcttttcacctctcagtctcctgtaagcggattctttgccaatgtctaagacatccataagcaaagtgaccggttttaagttttccggcatgatatccagaatctttgtcaaaacaattttatttaaattcatagtcatgagtcaatgtattattaaatattgtaaatatgaaaattaagcatctaaatataaaacgacagcaataatgtttagttcgataatttgaacaataatttcccgttttttcaaaaagtgaaatagattcttttcgcttgtttattataatcccagttattgtgtcatttatcagtgtatgttttatgtttccgtaaacaaagtccattaaacgtctcaaatactatcatacagttcgaatgtaacagttttctttgtaatacgaacattttagactaattatatgaagctccagaaatcaaatattagagggagaattatgaatatagccaaatggcgatataaattagaaatttttaaagtaaagaagtttctatgtgtaatgatgctttttgtttttgctgctagggtagcttattcggaaaatgtcggacaagaaacgaaaacaataaacaatatgcctgcatatcttactattggtactaatctactatattgggcggcacttgcaccaaatgtaactgccgagtattatttcccggacagtcattggtctatatcgggcacctttactatgccttggtggaaaaggaaatccaaacaccagtattatcagatcaggcaataccttgcggaaggccgatattggctgaacagcaaggctgccggaaggaaacattttctgggagccaatatccatggtggtatctatgatctcgaaaataagaaaacgggatattatggtgagttcataggaacgagtctcacctatggatacagtcttaacttgaatgggaagatgtcattggagttcactattggtggaggatatatattcacgaattatgataaatatttgcctgtagataaccgctatgtataccaatcgacgcataagacgcactattggggagtgacaaaagcgggtatcactctgatatggaatattctgtatcagaaaaggtgaactaatcttttataatgaataagactagacgatatgaatattggttttatatgcttgttttgactgtttttataagttgtagaaaggatttatattacgagcatttcaaggaggtagacttgcatctggagatcacttattccttggattggcacttgccatgtgatgaaaactggaatgagaaatggcctgccgagtggacggtagattgggataggatgctgcctcgggtaccggaaggtgtcaggctccatgttttcgactacggcgataagactcccatttcaagtcacaatttcgagcatcatggcggtcgtgtggcaatcaatagcggacgttatgatatgctattgtacaataatgatacggaagggatcatctttgagaatatgcatgcggtaaacgaagcggttgcaactacccgtacccgaacgcgttcggcatcctattcgaacaagtatcccgatgagttgaccgctaatgtcccggatatgctgtttgccgcatttctgtccgaacaagaattagtgaaaaatgaagatgaagagacaacctatgcgaggatgaaggtcgaactggctcctagaacgtggacctacctgatcagatatgaattcatttcaggccgggagtatgtttccgaagcccgtgcctacttatcggggatggcagggaaagtttctttgaaagatggacataccgacaacgacaaagtagtcaccctgttgctcgattgctatacctgtgattacggcgtcgaaaccattgctcgttctttcgggcgatcggagacggccgccacgcataaacttgtgctggaattgaaactgatgagtggtaaagttaaaatggtggagtttgatgtcactgatcaagttagcaggcaaccccagggaggagtcattgttgtcaatggcattgtggtcactcctgaagaaggagaaagacccggcggctccggattcgacggggatgtgaacgattgggaagaaaatgtagatgtggatattcccatctcataaatataaataagtaattaatttaattattgaatccatttaaaaaagaaagaatgatgagaaaaaccaatttgtttgctgttttaacagcagttgttgcattgacgtttaccgcatgcaccaatatcgaagatgtggcaatgccagagcagaaagtgctggacttttctgtttttgccaacaagaacacacgtgcagctgaaacgggcagcacgctcaagactgatgggaaagcattcggagtctgggggtattctacttttgaaaccgtggatactgatgtattcctgaatcaggaagtgaagtataatggaactacaagtgtatgggaatattcgcctttgaaatactgggatacgcgttcgtcctatgagttctatgcttattatccttataaagccagtggagtgactatcgatgataataaaaacatcaccgttacagatttcaccgtagaacctttagttgccaatcacgtagacttgatgcttgcagacaaagtgacacgattggccaatgctcctgtcaatcaggttacttttaactttaatcatttactgtcgaatatcaatctttcctttaagaaagatgttggcattgctgaaactaaggttacattgaagacagtgaagatttacgggatgagtaaaaaaggtacttttgttcagtcgcaggtacctgaatgggctatatccgatactgattttgtaggagcaagcgattcaaatctggagaacctggcaagtgacaatgtacttgatgttgctacagcagtaacgtttaacgatatgctgttcattccgcagaatacgaacagtgtgaaagtggatgtcacttacaatcttggtgaatcaggagctgaacagccgttcacaaggacgctcgaccttagttatgacacttcggacagaacatacaatccggctgcgtggggacagaaccagaaaataacgtataatttcattatcagtgccaatgcgatagaattcggtgatcctacagtagaagattggacaacaacaatcccggatgtagaagttccttctatcaattaatgatgagagaatattaatccctgtcattctgtgctttccgggcggttccttctctggcatgaatacacggaaaagagaattttcggtcacgcccagaatgacagatactccgttatatactgattaagatgtattatttgaataatagaaaagaagaatggatagtataatgaaaaaaacagctttcattataggtttaatatcattattgaccgcctgcaatagtggaagtgatgactgctttatggagcttcccgacactcctgccggaaaagcttccatatcttttgacggtgcccggacacgtgcatccctaaatactatatcgagtacctttgctctttacggaaccgcaacggatgccggcaatacttcggtcgttttcaataatcagaagatagagtataataacgagagtaccctctgggtttattccccattgaaatattggaatacacaagccgatcacaagttcggagcttatgctccttataattcctcccggaatttctcattcaatccggaaggatttccgatgataacaggtttcatggtaagtcagaatgttgacaatcaggaatctctcttgctttcgcatccggttgaccgggaggtaagagcaggtggcttggatatgtccccggtggtatttacattcgacccggcgctgacaagaattaattttagaataaagaaagaatcttccctgactgatgcgcttcacttaaacgtattgcgtatgtataacctgaaatcatccggtaattgtacccataacggcaaccggatcatttgggacacatcatccgccccaacaaatacctttggatacagtacaggatttacaaacccacaggaagtttcatacgaaggaattattgcctgggaagatggtgctttgatggtacctcaacagatttccggtatcacagtatatttgagctatacacgtcggcacaatgacctgacctattcgtatgataaggataatataattctgcccggagcagactggcaacccggtcaacaaataacctatgtattgacacttaaacccgaaaattatattgaaataggtgaacctatcgtggaaccgtggattgacagtccatcaggaggtggcaccatcattgtaaattaaactatggagtatgaaagaatctattattttaaaatatatatggttattatccggtaacttcatgattgccatattgttggcggcgtgtaacggcagtaatataatccctgataatccggatgaagaaatagagattattcccgaacgttccatcactttcagtttggggacggctacgcgtgctctgcctgtcactcaattgcgtggcgagagctttggtgtgaaggcttatatactggataacctatgggctgcagcaggatataatgcaaagccggacactgattggaataatgtgaggattgactgtagtgattcgggagtctgtacgtatgcccctatccagtcatggctggataacaaatactacacatttttcggttattatccgtataatacccccggtgtaactgtttccgatgcaaatcacgaatcgacaccttacatagagtatcgtctgtcggccaatgacccgacgcaacatcaggatgtcatggttgcgtcaacattcgactgtacggcattgaataccggtcaggtcaggatgcaattttcgcatatacttttctgcatcaatatcgcagtgaataattatcgtgatgaggccatccggttgaataatgtgatatgtcggtttacatcccctttatacagcacatataggataaagatggataaaagcgaaccggataccggcggaaccatcaccaatgcgtcttacctgatggcaagcagcgtgaatgtatccaatacatcggcaacaggggcgataaatatcacggatgccgatcggttcttaatgctgattccgcagcgaggtttgcaggggactatttctttcgatgtcactcagggcggacaaacgactacgaaagtggttgaattcaacgaccccgacacggagtatcgcgcaggatataggtatacattcacgctctatttcgtaggagatgccattcatctcagaatcattcgaaataatgagtggaatgataataatagtgaaatagaatttgattaaggaaggtttgatttaatgataaggataattagctatacacacttgttgatactcgttttgtcggttggtgtactgtttggatgcaatagcgacattgtggaacagaagagacaggccgaaagccggtatatacgtataaacgggtatcccaaaggattctctgaagtggaagtttcgactcgttcgggaaagaatgagttcgagactaaactctctaccttatatatgctcatctttgatgccaacgggcagttggtagatgttccgcaatttatagccagtggtgtgcctgatttcttgatagatacacatagtccgtcttttgtcaatcacgatcagcaggcgcttcgacagtgtgatatttttttggtgggtaatttgaataatggagatcttgccggtatacggagtcttacggaactctataatttcgaagtcgaagcgacaacgattcatccggatgccgatccttcatttaagggattggttatgattggacaaacacaggaaaaggtcgacttgagcttggcgcgtccttccacgagtaataatattcaggatatattcatggtgagcatctatgctaaagtcgttgtgaatttgcaaatacgtccggaggaacatttgcccggaaacgaccagagctttcggatgattagctgggaggtcgtgaacgctccgcgctatgcaactctcggtgcgcccgatgctaccgatgaaaccgcaccttcgcatggtgataagataccttccagccctttgggattatactccggttccaatccggtgggagtctcccaatccctgtcctataccttttatatgttggagcacaagcgcaataagttgaacaccgtgaattatccggaaggtatcgacgaaatgtccaaacagcgtttcaaaccaaagtttgtgaacgaagatacggatgctgcctatatgattattaacggaatatatgtcgatcatcagcttgtcacgcacgagaccacttacaagctgtatctcggcgccaacgccgtggatgatttctatattctgcgtgataatcagtataacaataatataacaatcaaaggagtgaccagtaacagtggctatgatgaatcgactgtttcgtttgatgcccgcgtcacagtaaattccggaccggtagttgtttcggtcaagcgggatacacaacttgattgccattatgaagttcgtccgctggatatttatataactcccggttatacggtgaatgttgcagtagatcctgcggcacagaactggataggcttggatagggaaacaatagctgatggtaaggttgtcaaacgggattatttcactacaaacctgatttcaaccttgcctaaaagttatggacctttcacttccgattttcgggtatgggcctattttgatgagaatacttctacgtcggatagaataggtaaaatcatattcacctacattgagacagcaacgggtgaccagactgtgcttacctatactttcttgcagaaaggtctgtttgaggtggcttacaatggacatacttattacatcgaatttcatgaagagtatctccataacttcgaccccaacgatcctttcaataataagacggacggaatgttttggggcctcgatggcatgcaactttctcaccggagagatgctttcaagtatgatggtatcttatctaactctattaccaataatataaaaagtttattgagagaacttgatccacaattttatctttatgacttttatacacctcgtgatgaagcgacagtgggaaccaatggagttacaataaacgagcgtgccggacatgcatttacaagtgacattgttgctacggcaggtatcggacctttaaagctgaatgaaacagcaggaagtgccgttgaatattgttataacaagaacaagcgtaatgctgcagggatagtatccgaaataaaatggtatcttcccgccatagacgaaatagaagatatcgttatgggggcttatggtacttttacagattttcagaataagtattactggtcgtctcaacctgcttatgattactatacctatcactatagagggcttggaggactcaactcgggagatggtaactttttcaatgacaatttatatagtgccagagctaccaagatagattatcagagttctgtatacaatactgtaaaaagcggtatgagtgattatttgataaaattcaatttcagaagaccatcgatatttgaggcagttacttggggaaatcctcgtgaggagattaatccggtcactcctgtcgatgatccgggtaaacaattaagaacgaatataaatcgtatacgctgtgtgtatagggcaaactagttattgcgtctatatacttctataatcggagctataattgggaatcaccagctagttggcttttggacgaaatataagaagtagtttggtatatcaaccatttctaaataattagtatatataaaaagaacactcattgctgcttttgcaacattgagtgttctttactattatggagctatcaatggagttttattacctctcgcgaaccgtttatttttatatctgtatcaggcaataatcttttgatacgctctattccctctttggttatctttccatataaactcaacgatccgattttaatctttgatatttcatcaggtatatcaattgtgtcgataaattggatatccagtctttttatttctttgagttctaacagtacagccggaaattcttttactctgatattaatgccgcttccccagccatccttttgagcatcagcacttaatttactttttaatccatccttattaacatctttctttctgatcatccaaccaatttgcggtcgtagagcaaaagtcttgctattttgctctaatccgatgaaacctgcccaaaattctaatggagtttctttgacgccatcggtatatacttcctgatactttacatctaccttcactatctcatcaggaagacaatttctgccttcaagctgtttcagattatttctttttccttccttatcataagggaaaaacttcacgatccatccatcaatgatattgggtgctccatactttttctgtgaatgatatttaaacatattgcgccaaaagtccttattaacttctcctttggatgctttgacaaattcttccaaaagaggttccagttctgaaatccaccaatcgagtttatattctttcaagcctctggctttgtgcagcagtttttcccagtcctccggtgttccttcgagagttattttaggtattccacagacaatgcgtatgattataaactcaaagtaaggtttcacagcttccatgattgtgatttcggaagcaactttctctaaggaggtggtcgttgaaaaattgcaagtgagcagttcagtcagatgattgcctgcgtattgggatatttgttttgtaaattgcggaaagatttcctcccatgaaagagtagggtcttccagctttttatcttctctcacaattaaggatagtttgccggagaaatcaacaagatcatttctcatagattcctgattggcattgatatggcgtgcaaatccttggctgattaataaccaaatcatgtccggggacaatacgaatggcctgtgatccgcataagcctgatacataccgttgaaaaaagaattagggccaaaagaaacgagactgtcgggagattcgctctttgcaatgatatgataaggaaccttgatattcttctcttttatctcataaggctctatgtccatatccgataatataagactctcataaatttcattcggggagtgtagattaagtaattcttcaggctttgaaagcttttcgaccttaaaagtgattccattttgagcgaatatcggaacactgaaaagtattaataagtaaaatagtgcgtttctcataatcttaaagagttgtaggatagtgtaaacttatcaggtacatctatgctttgaatagacgatatgcaaatataatattataagagctagatttgacaggatattgaatgttttttgatttatctctataaaaatcataagcgcattatttcttaaaccgataaacaggaattattcgggaatttgtagtaagtttgctctgctaatcctaaacaatgacgcagagaaagattatacatatcgacatggatgccttctatgcctctgtagaacagcgtgataacccggaacttcgtggcaagcctttggcggtaggtcatgcagaagagcggggagtcgtggctgctgccagctatgaagcccggcgttacggtgtccgttccgccatggcttcgcaaaaggcgaagcgtctttgtccccaactcatttttgtacctggcaggatggatatttataaatccgtttcccgtcagatacatgagattttccacgaatatacagatctcatcgaacctctgtctctggatgaggctttcttggatgtcactgaaaacaagaaagatatttctctggctgtggatatagcaaaggaaataaagcagaagattagggaacaactcaaccttgttgcgtctgccggaatttcttataataagtttctggctaaaatagcttcggactatcgtaaaccggatggcttatgtaccattcatccggaacaagcccttgattttatcgcccgtcttcctatcgaatctttttggggagtggggccggtgactgcgaaaaagatgcatctacttggtattcacaatggacttcaattacggaaatgctctcttgaaatgctgacagcccatttcggaaaagccggcgcgttgtattacgaatgttcacggggaattgacgaacgccctgtcgaagcaattcgtatccgtaaatccatcggctgcgaacgtacattggaacgtgatatttcagcccattcatcagttataatcgaattatatcacgttgcagtagagctgattgagcgtcttcagcgaaaagacttcaaagggaatacacttaccttgaaaatcaagtttcatgattttagtcagataacccgaagtttgactcaatcgcaggaattaacgactttagaccgaatacttccattggcaaaggaactacttaaaagcgtggaatacgagcaacatccaatccggctcatcggcctttctgtctccaatccaagagaggaagccgatgaacaacacggtgtttgggaacagttgagctttgaatttagcgattgggattgagggcgaagaggaggaagaaatagagggatgaagaggaaagagtaggggatgaaaaaatgggaatcaacgaatgaaaaaaggaagagaatagaatgtcaaaacagagcctctatttgcactaaacagagcctctatttgaagtaaacagaacctctattttccccaaacagagcctctgtttttccgaaatgagtccccggtttctgtatgacttaaatcgttcttactatgacttaaaagcctaaaatatagcaattatgagtactatttttgccgtctgtacttttttgtcatcaggttcgtatgatttactcacctcatttttcttcagatacactatctttgcaatacttaaatgaatgaaaataccatgactcgaatgaaacatttgctttgtgtttttctggtagcagctttggggagtttctctttcaaggcaaacgcttataccgaacgcaatatgctgcaaaaagcggctgacgagactacgttgaaaaacgtgttaataatgaaacaggcttgggtgccttatcctgcttataccgatcgtgccgcctgggattccctgatgggacccaacaaacaacgtctcatcgaagccggcgaaaaactcctcgactataagtggcaactgatacctgccactgcctatctggaatacgaacgtagcggtaaccgtaaaataatggaagttccttatgacgccaaccgccaggcacttaacgccttgatgcttgccgagctggccgaaggaaaaggacgttttatcgaccaattactgaacggagcatatatgagctgtgaaatgaattcatgggttctatccgcacacttgccgcgccagagcagtaaacgttcacttcccgacttccgcgaacagattatcgacctcggttcaggcggatacggagcattaatggcttgggtacactatttcttccgcaaaccattcgacaaaatcaatcctgtggtatctttgcaaatgcgtaaagcaatcaaagaacgtattctcgatccgtatatgaacgacgacgaaatgtggtggatggcttttaactggaaaccgggagaaatcatcaacaactggaatccctggtgtaactccaatgccctgcaatgtttcttactgatggagaacaataaggataagttggcgaaagctgtttatcgctccatgcagtcagtcgataagtttatcaactttgtgaaatccgatggtgcctgtgaggagggaacctcttactggggacatgccgccggaaagctctatgactatttgcagatactctctgatggcacaggcggtaaattgtctctgttcaatgaaccgatgattcgccggatgggagaatatatgtcccgttcatacgtgggcaatggctgggtggtgaattttgctgatgcatcggcacaaggggggggcgatcctttgttaatctatcggtacggtaaagctgtaaacagcgatgaaatgatgcattttgccgcatacctgttgaatggaagaaaaccgtatgctaccatgggcaacgatgcttttcgttcgcttcaatctctactttgctgtaatgagctggcaaaagcaactccgaaacatgatatgccggatgtaacctggtatcccgaaacggaattctgttatatgaagaacaagaacggtatgtttgttgccgctaaaggcggatttaataacgaaagccataaccacaacgatgtaggaaccttttctttatacgtaaatacaattcctgtgattattgatgccggtgtaggtacatataccaaacagacgttcggtaaagaccgctataccatctggaccatgcagagcaactatcataacttgccgatgattaacggagtaccgcagaaattcgggcaggagtataaagctaccaataccgtttgcaatgagaaggaacggatgttctctacggatatagctactgcttatccggcagaagcgaaagtgaaaagttgggttcgctcttatgctcttgatgataaaaaactcattattggtgataattatacgttggatgaggctattgctcctaatcaaatgaattttttaacttggggcaatgtgactttcccttcagccggaaaaatccgtatcgaagtaaagggacaaaaggtggaaatgaactatccgtcgcagtttaaagctgaactggaaacaatcaaactggatgatccgcgcctgtctaacgtatggggcaaagagatttaccgtatcacactaaagactgaagaaaagaaagtgactggtaaatatggatttgttattcaacaagtgaagtaggatgaaatagatttttaaagctagaaaaaataaagtataaacaattaaatcacagtaagatgaaaaaagtattatttgccggccttttggtccttgcaggagtaagcgtaagtgcgcagaacctgataaaaaacgaaaaattcgccactgaagtgaagactaaagtgactaatgccaacaaagctaccgcaggagagtggtttatcatgaataatgaagctgacggtgtaactactattgcttgggaagaaacaggagatgccaaatatccgaatgcaatgaaattggataactccggtgccgaaaagaatctctcttggtataaagctttcctgggacaacgtattaccgatggtttggacaaaggtatctatgttcttactttctatgcaaaagctaaagaagcaggaactccggtcagcgtatacatcaagcagaccaatgaggaaaagaatgataatggtaagtacaatactactttcttcatgcgtagagactatgacgcggatgctcaaccgaatgcttcgggtgcacaatacaattttaaaattaaagaggccggtaaatggactaaagtagtggtttactatgatatgggacaagtggtaaatgctattagcagcaagaaagcaaatgctaacttggaagtgtctgatacagacgatgatgctgctattctgaaagattgttatgtggctattctttcccagaacaaaggcggcgttgtagaaatcagtgacgtgacattgaaaaagaaataaagagcaaaggatttaatatagtaggttaacaaaaaaaatagggcagtgaagtagtgatacttcgttgccctatttcttttgttatatgaatataatggagagttctgaataaataaatgtatgaaacagccaatctcccttcgggactgatttcatgcgatttattgaataccgagtttcttcttcagttccttaggcagagaatctttgtgtaccatcacacagattgttttagcacgtacatagctttcagacatattcagataacctccggatttgttgctatccgctccccaggaattcttggtgatataatatttagtaccattctgatcttttacaataccggtgatgtgcatcaggtggtcgtcagttgtcacaaacttctcgtaaccatcctgacggatttccggtgttacgttgatttccggataaggatgttcaaacttgaacacttcgtccattcgttcgtatttaggcattttctcaaaacgggcacggtcggtagtcgagtaatctttcacatcctccacttgcggattgatggcgattccgttcttgaaagagaaaccctgttcgctaacgtcaccatcccaacatacggtatatcctttgttcagtgcatagtcgatagcctcgatcagttcgtccaacggaagattatacatcggctggttttcccagttgtcgggaacttcaggtgagaatgtctcataataaggcttgtgagtgaaactagtcagttcaacgtaatcatccatattcaatcccagactttctgtgaaagattgaggagtatattcttttcctttataagtgaacttttcgggaactttacccagataaatatcgaacagattattaataagcgcatcaaattgcggagtacgctttttagattcaatatttgcgtctaccaatgctttgaggtagcgtgacaatgctccgtgattgtggtctttcttatcgcccggcaatccggtgtacacttcttccggaacgattcccgctttcttataagcgtttttgaaagtgtgtgccaaacttccttcaccgatacttcctttaccacgacggagataattgtcctccatctgattcatgtacttttggcggacgataaacatttccgagagatcatattctccttttcccattcggagcagttccgactccatgaaagaagcggtggcaaagcaccaacaggttcctgtggaaccctgatctttgacaggcgttgcttggtgagatacaacggttgtgaactcataaccaggtgtttgtgcaaaagaggttacgaccaatatgaggagcgcaaccgacataaatagctttttcataatgtgttttattatctttcttctgcaaatgtataaaaaaagcgaggatactcgaaagttcctcgctctatttattataattagtgtgtttatttacatggcaacctgctgtgacagcagtttttgaagtttaccgtttaatgtttggcacatggcaccatttcccattgcttgatagcgtttaatacggtactgtaacatcataattttttcatttgcattctttttcataatttgtttcctctttttttgccctccacgttttgaagagcggttttacatcttgttttctctaataacactgcaaagatacaaattgttttcgaattatatgctgtaaaacataaaaatcttcttttccttttgaattttctttttataagggttcgaacacggtcgatgttacaaacttgttacaaaattcccggattttcccatcaatgacaatattattcttatctatcacatttttatgtacttatctaggtattcagaaaatattcttctatttttgtcagtcagcaaccttattaatagaataaaccaaacacttatatgaaaacattcacccatcttttgtgcgtcctgattttgtcgattgtactgtttgcttgtaacaatgttcacttcctcaaagaagaatcctaccagaatcaagtagctcaagactttgagcagaaaaaacaggcacttcctcatggagatttatttgcaatctttgccgattctattttgtcagtctacgagcgcgaagcattgatgtttctctacgcttatatgccgataggggatgtgacggactatccgggagattattacttggagaatgtccggttgtcgaagcagacacgtgacgagatgccttggggcaaagagattcccgatgaagtgttccgtcattttgttctgccgatccgggtgaataacgagaatctggatgattcccgtcgtgtgttttatgatgaactaaaagacagagtgaagggactgccgatgaaagacgcgatattggaggtgaaccactggtgtcacgagaaagtagtctatcgtccgagtgacgcgcgtaccagctcaccgttggcatcagtcaaaacagcgtatgggcgttgtggcgaagagtctacatttacggtggctgcgctccgggcagtcggtattccggcacggcaagtgtatacgccccgctgggcgcatacggatgacaatcatgcttgggtggaagcatgggcggatggacattggtatttcttcggagcctgtgaaccggaaccggttttgaacttgggatggtttaattcccctgccagtcggggaatgttgatgcataccaaggttttcggacgttacaacggtccggaagagatcatgcttgagacaccgaattatacagaaattaatgtgattgataattatgcccctactgccaaagctatcgtaacggtggcggatgccgacggccaaccggtagcagatgccaaagtcgaatttaagatatacaattatgcggagttctatacagtagccacgaaatatacagatgcagaagggaaagccagcctgactgccggtaaaggagatatgttggtttgggcatcccgcaacggacaatttggttatgccaaaatctcatttggaaaagatgatgcactgcaactttctttaaataggaaagaaggtgaagcctattccttgccaatggatcttgtacctccggtggaaggagcgaatattcccgaagtcactcccgaacaacgggcggaaaatgatcggcggatggcgcaggaagattcaatccgcaatgcgtatgtagcaacaatgatgacggaaaaacagaccaaagagtggatagataaactatatggaaataccttacaatcggaaaagaaagaaaaattagtaaacttcctggttgcttcgcgaggaaaccaccaaaccttgaaagacttcctttcgcctatccgaaaagagaaagacgctgtttcatgggaagaaatacgggctatatggatattagagagtctttcggctaaagatctccgcgatgtaactctggatgtattgaatgatcatctgctgactaatatttcggattgggagaagatagagactgatttatttaaaagaatgtacctcaatcctcctcgtatagccaatgaaatgttgactccttataaaaaggtacttcgtgaagccattgaaaaaacagtgtaccagtctgtgcccgatagcatgaaacgtgatcccaaagtattaatagaatggtgcagaaaagagattaaaatcaataatgaactgaattcccaacagattcctatctctccgatgggagtatggaaagcacgggtggctgatgaaaagtcgcgtgatatattctttgtggcagcttaccggagcatgggatgggcgtccgctgcctggattgatgaagtgaccggaaaggtgcagattctaaatgaagaatttgcaaaggaagatgtcaacttcgatacggcagaagctgcacagtctcgaaagggagtattgcaagctacttatactcctatccgctctgtggaagatcctaaatattattcgcatttcactctttccaaatttaaaaacggcacattccagttacttaattatgacgaaggagagacggatatgggggatggaactacctggcgtaatttattaaaatatgggagagagcttgatgaaggctattatatgatggtgaccggaactcggttggcaagtggcgcggtgctttccaacagtacattttttacaatagaacccggtaagacaaccaccgttgaccttgtgatgcgtgaaagcaaagatcaggtgcaagtgatcggcaattttaattcggaagcgacctatcgtccggttgacagcactgaacagcggagtattctacaaacctgtggacgtggatattttgtagtagctgtgcttggagtagggcaggaacctaccaatcatgcgctaagagatatagccgctttgggcaatgacttcgaacaatgggggcgtaagatggtctttcttttcccttcggaaaaacaatacaaaaaatttaatgccgacgaattcaaaggacttccgtctaccatcacttacggtattgatgtcgatgacagcatccgcaaagaaatagtgcaggctatgaatttgaacaattctattctgccggtgtttatcattgcagatacatttaatagggtagtctttgtttctcaaggatatacaatcggtttgggtgagcaattgatgaaagttgtacatgggttatagaaaagaggaggtatacaataatcgttaattcttgccctaaatgcgttttttcggaaaagaatgattacgtttgcagcaaattatgactaagtacattttttgcatattagcatgtgcatttctggtattgggatttagtaatgtttccaataaagaattgcagggatttcagaaaaaaactgaaacctcgtctaatgacatgcgatatgaagcagtgtcatgctgttgcgtttcttctgccggcttcgacaagccaggtaaagattctcattcgcagtttgttgacgagacatccacttgtaatgttagtgactgcatttttgacaatatctcttttccgagaagcattgttcctttcaagaacctgaagttcaataccaatactgtcattatacagatattgagctctctgaatgttatgcttccggagaatcgtttggggcataccggccttgatgtcaattacactaaatattcatgtaagtattacgtctatacattggcgcatattctcatttagactatattctgatctttgggtaaggtgaggtgcctattcagatcctccatctaccatcatttcctttatttattatcttagttttattcatgttaacatggaaaacaaagaatgtatttcctatgacttggaacaaaggacggatattgatgtgtctgtctttaaggattaaaatattgtgttcccgttgtgaaacgggagttacgtcgtataaaagcaaggatatttgaataagattatacaacctaattttttatattactatgattcatttattactatctactcttgcgatgatggggcttacgttcctcatcggtttttttgtcgctgcggtcattaagttgattgcctatgcggccgattcatttgatttttatagttcccaccgtttggagctactccgtttgcgacgctggcgtcagcatcggcaaaaggtggagagattagtccgacagattcccattgcagatgaagatgctttgggagatttccgtgaagattacagtaaggggatcgacagaaactttactggctattccggctattatcatggcgtgagtccgggagcttctgaaaataatctgatgaattattattattcacaggatacccgcgaattctttcttcgggaagaagagcaggcacatgtcaataaaaagaactcaaagaaacttgctaacaacaaacaataaaagaaaactaatttatggaaaatatagattttgctaccttgtttcaaggtattggtacaatgatggcaagcggatgggtgcttgcttctgcaagagtttttttagtacttctcggtttgttactgatctatttaggctggaaaggtatacttgaaccgatggtaatgattccgatgggattgggaatggtagctatcaactgcggaaccctcattatgcccgacggtacactgggcaatctctttctcgatccaatgctttcagatacggatcaattaatgaatactatgcagatagatttcctgcaacctgtttataccctgacgtttagtaacgggctgatagcttgttttgtctttatgggtatcgggacgcttctggatgtcggcttcctgcttcagaaaccatttgcaagtatatttctggctttgtgcgcagagctgggcacttttctgacagtacctattgcttctgctcttggtctgactctgaaagaaagtgcatctgtggctatggtgggtggagccgacggaccaatggttttgtttacttcgttggcattggcaaagcatctctttgttcctattacggtggttgcctatctttatttgggcttaacgtatggaggctatccttacttggtaaaactgttggttcccaaacgcttccgcgctattaagatggtgacaaagaaagctccgaagaattatgacgctaaagtgaaactggctttctctgctgttctttgtgctattctctgtttcttgttcccggtagcttctcctttgtttttctctttgttcctgggtgttgctgttcgtgagtcgggtatgaaacatatctatgattttgtgagtggtccgttgctttatggctccacttttatgttgggcgtactgctgggtgtactttgtgatgcacatctgttgcttgatccgaagatcttgaaactactagtattaggtattgtagcattattactttccggtatcggaggaataatcggaggatatatcatgtatattattaaacggggtaattacaatccggtaatcggtattgcagctgttagctgtgtacccactaccgcgaaggttgcacaaaagattgtaagcaaagataatccggactcatttgttttgggagatgccttgggagctaatatctcgggagtaattacttcggctattattactggtatttatattacgataattccatatttataaataaaagtatagcagtgttttgagatactgttggtaatgatgcaaaaaagaaatggtgaacaaaaggcttgaaggctgtatgttcaccatttctgtcttgtattagtactattatgagacgatatttcatcccttgtcgccatatttatccatgtaaagcggcatcaatcgtttcttttactcttcgtatggaagttacatttcgttcgtattcgttgatgtgtaccgtgcctcccatggagacggcttcatttttgaatatcatttcgctctgaatactttcacgtgccgagaaatgaaactcgttgattccggtttctgcggcaatgcgcgcgatattattttcatttactccgcatccggcgagtaatgtgattcttccggcagcctgtttctgtaactcttctaaaagggggattccctgttcagccgtaggttgctgaccggaagtcagaatacggttacatcccagtttgatgatctgttccaatgctctctgcgggttacggcatacatcaaatgcccggtgaaaagtcacagatagcccttgagctgcttccattagtttctgcattgctggcaagtctacttcaccctctgctgtcaggcaaccggataccactccgtctgcccctaatttccgtgcaatttcaatatctttcagcattgtccggatttcgatatccgaatacagaaaatctcctccacgaggccggataataacgtgcaggcgggtatgagtcagtacttcccttgcgatggcgatctcaccataggagggcgttgttccaccttccggtattccggcacacagttccacacggtctgctccaccttcctgtgcggccaggcaactttccactgaattggtacaaatctcaaattgatactttcccatagtcgtgtattaaaaaagggtgaatttcttcgcccttgtatgaatcttcttttgaatcgttacgttatttagcgaaacttaccgcacgtgtttcacggataacggtaatcttcacttgtcccggataagtcatttcatcctggatcttcttggcgatttcacctgacaggctttctgtctgcttgtcgtcaatcttatctgcaccaacgataacgcggagttcgcgccctgcctggatagcatacgtctttgttacacccggataagccatagccagttgttcgagatcgttcagacgcttgatataagcctctacgatttcgcggcgtgcgcccggacgtgcgccggagatggcatcacatacttgtacgataggagccaacagactggtcatttctgtttcgtcatggtgagcaccgatagcgttgcagatatccggtttttctttgtatttctcggcaagtttcatacccaacaatgcgtgcggcaattccggttcttcatcaggcactttaccaatatcatgcagcaaacctgcacgttttgctttcttcgggttcagtcccagttccgatgccatcacagcacaaagattggctgtttcgcgtgcatgctgcaacaagttctgaccgtatgaagaacgatatttcatcttaccgatgatacggatcaattcaggatgcagaccgtggatacccaagtcgatggtagtacgtttacccgtttcgataatttcttcttccacctgtttgcgcactttagctaccacttcttcgatacgggccggatggatacgtccgtcagtcacaagctgatgcagggccaaacgggcaatttcacggcgaaccgggtcgaaggcagaaagaacgattgcttccggggtatcgtctacaacgatttcaacgccggtagcagcttccagagcacggatattacgtccttcacgtccgataatacgtcccttgatttcatccgattcgatatggaatactgtaacagagttttcaatggcagtttccgtagccacccgttggatagactggataacgatacgtttggcttctttgctggcagttaatttagcatcatccataatgtcgttgatgaatgattgtgcctgcgttttagcttcttccttcagtgattctaccaggcgttctttggcctcttcggcagacaatccggagattgcttccagtttatcaatttcctgctgttgcagtttatcgagttcttcttttttcttgtcaacaatcacaagttgcgcttccaggttctcttttaccgcttcggcttccatctttttacgttggatttcttcctgacgctggctaagtaccatttcacgttgcttcaacttgttttccgcttgctgaatcttctgattccgcaatgctacctccttttcaagatccgctttcttattcaggaatttctccttcacttccagcagcttgtttttcttaattacttccgcttccgtctccgcttctttcaggacattgtcgtatttggatttcagtacataccggaatagtatatatgaaaggactcctcctacgatgaagcaagcaattgctgttgctattattgctatcattctacatttaatttaagtatataaataaaaacgcaccgccaaatatcaaagcaattatttttgcttggatattgtgcagtgcgtggttgttttatctcttatcagcgaatagccggtcgggatttattcttccttaaaataatcctccagcaattctgtcagttcttttaccttctccacataggggctggtatcattacgttgcatcaattgcagtctctctaacgagaactgataggctaccatggcaataattttttcgggttccagatttttatagacttcccgatacttattaagcctgatatttacctgcttggcggcttcccgtaccatttgttcttcctcacggttgatggttaacgggtagtttgagtctgctatctgcaggtttatctttattttatcgttcatacatcttcttcttattcattcaacaaagcgatgcatttatcgacttcacgcactaattttgacaatcgcagcttcgtctcttttacgtcgctgccgttaaggctgattgccgtagctgtttttaggtttgtatagctgacttccaattcatcgtattgagcttgtaccttctcgtttttcagcttttcattttcgagaagcttcttcaactcggcattttcacgctttagttcatcgtgcaaataaatcaaatgccgtagttgcgtttcaaaggaattcaataactttttttcttcttctgtcatcactacaccaaaattgtacacaaaaatacgattaactctgatattacaaaaacttttcgggagaaaatgttctttttcgtctaaattagctatgaacggagaggaaagtagagtattgcataggaagcaaatacagactgcttataatattatggtatattttaaattaatgcgaattagtaattgaaaatgaattgtcattcatttttgtacgattctgaatcattacaaaatcgattaaatttttctactgggtatttattttcaatctttctatttcttctttcaccttttctctgtctcttcgatgaataaggagtttgcgggtgaagagtaacaatttcaccatctcttcacctgtagcgagtagtttcaaaaatagtttcaaggcttgaaacaatctgtttcacaccgagaaacacttcgtttcgctacttgaaacaaagtgtttcccgccttgaaacttttagtttcaaacaaggttgaaactaattacgaaatagctttactaattttactcaatggtggaatctggaggctgcaatttgatttgattcacgatgaagagtaggtgaaggggcagctattcacctacaaactgcttgtttatcggccatacagaagaaaagtgaaggagctggaagaattggacgtattatagagaaagagcattgaatgattcaaaactgtataaatctgaattcttcttttttgttggtatcgtataagattactattcagcaaacttttgtaacttcggtctgtttttcaggaaagtattaagatataatatctgatagataagtcattaatatacctccaaacgtggcgtcgatgcacgcattttgatttccgcatccaacacgattgaatgattgggagatgccggatctttgattttctctaaaataagttcggcagcttttttccccatctggtacaaaggcggttctactgtagtcaatttgggatagactatgttggaaagttcggttcctgaaaaactggctacggcgatttcttcgggtatttttttcccaagttccctcaatctgttcatagctccaatggccaatgtctccgtaaaagcgaagatagcattgaaaggaatatttctttccactaatatatccgcagcttttttcccttcttcaaaagtcataccggtttttatcagcatattattcttatcaaaaggaatcccgaatttagccaaagcgtctttgtatcctctgacacgttctatggagttgtaaatatcgtccggtccctgtatatgaacaatctgtttgcgtccgcttcggatcagactttctacgagaaagaatgacttcatataatcgtccactattacctgcgggacttcaagtccatagggaatacgatcatagaacaccataggcattcccgcttgctgcaaacgagcatattcctccttattccttttataactgcaaaggcagatgatgatgccgtccaccatgaatccttccatcagttgcaggttctctttttctttttccggatctcctccggactctgcaataatcacctttatatttttggtgtgaagcacttcttgtattccgtttattactcgtgaagcaaacggtgtaaccatttcaggaacgatcactcccacggtattagtatatccgtatttaaggttgattgctacagggttgggcctatatcccaatcttttagctgcttctatcaccttttctttcgtttctttacggatattcttgtcatcccccaatgcacgagatacagtggagacggatattgacaaatgtcgagcgatgtcttttatggttatatacttcatgctgaatgattgtttaaatcaaagcaaagatattgatttcaaacaataaatcctaatattggagtaaaatacgaatcccatttgcttttgtgtaatgcttttgtaacgtttgcagattttgggaacgttcccgcaatcgtttgcaggcaaaagagttaggaaaaaactttttttcaagctcttgttctttatctttgttacatcaacatgatgtcgaactaaagaaaaagaactatgaaaacacacctcttttcttataagtgcggtcgaaagcacatcaaagtttaccatctatttgaattggtaataattaaaggataaaaaacggtcatggacaagaaagtacgaagtatagaaatttcgaaacaggttccaattgtgggcaactatgatgtagttgtctgcggtggcggaccagctggtttcattgcggccattgcggctgctcgcagtggtgcgaaaactgctgttgtggaacaatatgggtttttaggtggaatggctacaatggggcttgttactcctttgagtgttttcacctataataatgaaaaggtgataggcggtattccatgggggtttatcgaacggctggagaagatgggaggctgtatcattgagaaacctcttggcaatgtagcttttgatccggagctttacaagcttttatgccagcaaatgatgctggaagccggtgtggatatgtatatgcactcttacttaagcggttgccaggcaaaagacggcaaaatatcctgtatcctctttgagaataagaatgggacagaagccatcagtgccgatatgtatatcgactgcactggggatggtgaccttgctgctatggcgggtgttccgatgcaaactgatgaatgtaaaccgctgcaacctctttccacctattttatattaggaggtgtggatacagattcgcccatgataatcgatgccatgcaccataataaacaagggcagaattgtcattgcattgcagttcgtgagaaacttttagcaatgaaagaggagcttggcatccccgagtttggaggcccttggttttgcaccactcttcgtccgggcgaagtaacggttaatatgacccgtactgcaggaaatgccattgataatagaaattttaccgcagcggaatgtcgcttacgggaagatgtatttaaaatagcacgaatctttaaagagaactttgaagagtttaaaaacagttatgtgacgaccgtcgccgtacatgccggtattcgtgagacacgccgtatcaaaggtgtacataccattacagcagaagaatatgtgaatgcttataaatatcctgatagcatatcacgcggcgcacatcctatagatatccatgtggcagcaggtgcggaacagagcgtgactttccttaaaaaagcggcgtatgtaccttatcgcgctcttatagctgaagattttccgaatttgctcgtagcgggacgctgtattagtgctgataagacttcctttgcgtcacttcgcgttcaggcaagttgtatgggggtaggacaagccgcaggagtggcagccgcacaatgtataaaggcaggtgtgaccgtacaaaaggctgatattcctcaaatccgcaactacgcgcctaatatgatacagaagcgaaaagaatctgcatcgttagtaaaaagggggcacagtgcatcgaatgtcaccataaagacatataaatgccccttaccccaccatgcgacttgaggcaatacgcaaaatcacgactataagttgtcggtgttatccaaagtcattctggaacacattggcataagcattgttgcatgaatagatattcagcacatacttccttgatgtcctgacccatttggctggcacagagatgaacttaaagacaaacgtcttgatgcggcttgttgctttgagtccgaacctcttcacgtcaagcctcgccatgatgaatttatagaagttgcgtatgagtgccataagcagaagaaacaccgtgttttctcccataaaggattttggaagcctgttccagccgaatccgttattcatatcatcgaagatgcgttccttccctccacggaggttatagaattcgacaatctctttctcggaagactcgtagtcatttgtaaggatgcagcggtaggtgtattctccttcccacaggtcgagttcgccgtctatccgcttctgtctttgaatcacaagacggtatgccttccctttccatttctcgatgagaatggaggccagctcaaactcaatgccgcccaattccactttcttccaacctctgagggcaaagatgtcattgtagagcgaactgcatcggttagcacggatatagaaggtcttgcagtgtttagcaatctcttccactatctcttcagaacacgagccgcaatcagctctgaaacggttgataataagcttgttttgttcaaacctttcaaagaacctcttcagcgtgtccttctggtggaaacggacatttgtgttgccgtcgctgttctcaatgccgacaatcaagttgccaataaccgccacgccagggcgataaccaaggaacttcttgtatgtaggcttcgcatcaaacttctcagcctctatgaactggtggtcgaagtcaacgtcatacccctcgccctctttcagctgccctgtggacaataggcaattgaggagcagtgtattcagcttgtctgccgtgttgaagtcgtaggtcttgccagtgtcggatgtgtaggaaatgttatcctgggtcagttcctttatggctctaagaatcgtgtcggcactgcatgtgcgaagtgtcggatgaagcgaaaggtggtacatcagatgagtggtgacatcctcgatgcatgagccgccacaaaaataaacgctcataagcgaacggatgatttcgctgtattgataaccatacagcctgcatctcataccgagggttgagtcgattacagatgagagtctggagtcaaattgctccattattgaaaatattcctccaaaaggagtgagtttctcggatttaattgctacctttgccatgtctgtcgggtttgatacatattttgatttgcaacactaagataggtgaaaaatctgacatggcaaattcctgagcaactttttgttgctcaggtacttaaaaagttatatttgtaatagtgttgcggaattaaggatattgacaatctcatagaggaattgaagaaactaggcgcaattatataaagaagaaccagaatatggaacagttagattatatcattattttactctactttctcggactgattgccgtgagtgttgtgatgtcctggaaaattaaaaactccgaagatatgtttattgccgggcgaaattcttcgtggtggctgtcgggagtctcttcctacatgactatcttctcggcaagtacctttgtcgtttggggaggcgttgcttataaatcgggacttgttgcggtagttgttgcactttgtcttggcgtagcatcgtttattgtcggtaaatggatctcgggcaaatggcgggagctacgtatcaaatctccgggagagttcctcaccatccggttcggacaccgcacggtgagtttttacacaatttcagggattatagcccgtgcggtacatacggcagtgtctctgtatgcggtagcggttgtgatgtgtgcattaatcaaagtcgatggtggcagtatttttgcaagtacaggtatgatgggcgattcaccgatgggttaccttagtatctggtgggcgcttctcatccttggtgccatcgctcttggatacaccattgccggaggatttcttgcggtactaatgactgatgtaattcagttcggagtacttctggccgtggttgtatttatgataccctcaaatccgcaactacgcgcctaatatgatacagaagcgaaaagaatctgcatcgttagtaaaaagggggcacagtgcatcgaatgtcaccataaagacatataaatgccccttaccccaccatgcgacttgaggcaatacgcaaaatcacgactataagttgtcggtgttatccaaagtcattctggaacacattggcataagcattgttgcatgaatagatattcagcacatacttccttgatgtcctgacccatttggctggcacagagatgaacttaaagacaaacgtcttgatgcggcttgttgctttgagtccgaacctcttcacgtcaagcctcgccatgatgaatttatagaagttgcgtatgagtgccataagcagaagaaacaccgtgttttctcccataaaggattttggaagcctgttccagccgaatccgttattcatatcatcgaagatgcgttccttccctccacggaggttatagaattcgacaatctctttctcggaagactcgtagtcatttgtaaggatgcagcggtaggtgtattctccttcccacaggtcgagttcgccgtctatccgcttctgtctttgaatcacaagacggtatgccttccctttccatttctcgatgagaatggaggccagctcaaactcaatgccgcccaattccactttcttccaacctctgagggcaaagatgtcattgtagagcgaactgcatcggttagcacggatatagaaggtcttgcagtgtttagcaatctcttccactatctcttcagaacacgagccgcaatcagctctgaaacggttgataataagcttgttttgttcaaacctttcaaagaacctcttcagcgtgtccttctggtggaaacggacatttgtgttgccgtcgctgttctcaatgccgacaatcaagttgccaataaccgccacgccagggcgataaccaaggaacttcttgtatgtaggcttcgcatcaaacttctcagcctctatgaactggtggtcgaagtcaacgtcatacccctcgccctctttcagctgccctgtggacaataggcaattgaggagcagtgtattcagcttgtctgccgtgttgaagtcgtaggtcttgccagtgtcggatgtgtaggaaatgttatcctgggtcagttcctttatggctctaagaatcgtgtcggcactgcatgtgcgaagtgtcggatgaagcgaaaggtggtacatcagatgagtggtgacatcctcgatgcatgagccgccacaaaaataaacgctcataagcgaacggatgatttcgctgtattgataaccatacagcctgcatctcataccgagggttgagtcgattacagatgagagtctggagtcaaattgctccattattgaaaatattcctccaaaaggagtgagtttctcggatttaattgctacctttgccatgtctgtcgggtttgatacatattttgatttgcaacactaagataggtgaaaaatctgacatggcaaattcctgagcaactttttgttgctcaggtacttaaaaagttatatttgtaatagtgttgcggaattaagggatacctctttcatttaacgcggtaggaggcgtaagtgcatttattgataaggccagtgagataccgggattcttctcgggcacatctccgacctatacatgggggtggcttttactgtggatatttctcaatgtgtccatgattggcggcgactggccgtttgtacagcgatacataagcgtgcctactacaagagacgcaaaaaagagtacttatttaatcggaattctttatatcgtcactcctctcatctggtatcttcctaccatgatttatcgtgtgatggaacccggacttgcgcttgatttggatgcaaccataatgactttcaacggtgaacacgcttatgtgaatatgagcaaacttgtgcttatgaaagggatggtcggtatgatgttggcagcgatgctatcggccacattgagtaatgtttcgggcattttgaatgtatatgccaatgtatatacttatgatatttggggacacaaagagaaaaaccgtcaggcagatgagaaaaagcgtatcaaggtaggacgtctcttcacatttgtctttggacttgtgattatcgctttgtcaatgctcatcccgtttgccggaggtgccgaaaaggtggtagtaactcttcttactatggtgatgtgtcctttatacattccgtcgatatggggactgttttcgaagcggctgacaggtaatcaacttatttctgcaatgattcttacctggctcgttggtattatggctcgcgtcataattcccgtctctgttattagtccaagccttatagagtcagttgccggttgtgtacttcctgtacttatccttgcaatcatggaagtttggtcggcacgtaaaaagtatgaagacaatggttatcaagccatttgtgaatatactgatcctgaagccgatcgcgaaccgacgttaaaggagaagaaagcggtattaatctattcgcatttggctgttaactgcttctgtattaccattggtgtcgttgcgctcttactgattggtctgcttattgccggcgatccgaagacccttgcggtcaaaggaattgtgataggaagtatcgtactgatgattgccatgatacttgcttatgtgatatacagaattatatatgcaagacgtctgaaaatgtctagctagtcaattaataataaccctaaatactaatcaaatgaatctaaagatgttattgtttgcaagtgtgtcgcttgtgctttttgcatcttgtcataactcggatgatccgtatatgacactcgcgacaaagacacttgatgtagaagcagaaggtgggcttttcactgttgacctttcatctaatgtctattacagagtcaataacgattgtcagactgatggaagcgatagccattgggcagttgttgattcgcatgagacacaaggtgagattactaagtttacaatcaaagtctctgaaaattcgtcgactagttcacgtgtcggtgccattcgtttcattggcgatgatgtaactcctctaaagctggttattacccaaaagatgattgttccgaaaggtatcagtcctatcaccgaatcgattgacgcaactacaacagaatcttcgttcaaagtctttggcgataaggagtggaatgctgtgtgtacagatgcggatgtgaccgtttctcctgcaaatggggtaggtgagtgtgatattaaacttactttcccggaaaacaagacatttgccaaacggacaattaaagtaacggtaaccatccaggatgatacagactatacctatactcttgtacaagatgctttctccggcattttggctgattgggacttgaatagtttaactgataatacgaacggaacatttgctgacggtgaagctcaatcggtatttcctggaaccaatggcaagtctattgctccaagtgccggaagtggtaagattgagtattgggcgtgtgaccggacggattatgtagtgcagaatgccatatgtgagcgtgcagtgggtggtaatggtgacccgtatgtgtcaggagccgttcccggtgattattggtatgtctatggggatatgaaaggtacgaccattcctgccggtaccaagatacacttctattttgtgaccaaattaggaacgatgtgttccaactactggatgatcgagttcaaggatggagaagaatggaaaccggctcttccgacttcgactcttcaggaaagtgcgacagagacactgtcgggtgcacctatcaattattcggcaactattacctataattttgcgggaatgttgctcgataacaaaaataatggtgcatatatccctgccgaaggaatatttaccacgactaaggatatggatgagattgtgttacggtttggacaggctggtcgtttatgtcttagtggtgccaaatatgccgggaagtatatcgactgcacacacgcaagtggccagacacgtttttcagcgcaacatccgagtaatcctgaaacaggtgaggcaattaaagagtataaccaacatgtattgcttgaaatcgtagaataaagagtatgaaaaaaagtatattaagcctgttattggcatgtttcctgcaaatcaatctggcttttgcacagaatgtaatgaagggtgtcgttagcgatgccaatggtcctcttgtcggagtggtgatccacgataaagacaatgcaaaaggtactacttccgatatgtcgggaaagtatgcgctcaatggtgctgaatcaggccatacaatagaattccgttatctaggttatgtgaccgagactgtggtatgggatggtaaaagtgtagtaaatataaaacttaaagaggatgctgtacaacttgaagagacggttgttatcggctatggatctgtaaaaaagaaagatcttacaggtgcggtcggtgtaatcaacagttcgcttatcgagaaacagagtacgtctcaactttcacaatctttgcaaggactgattccgggactgacggttacccgttcgagcagtatgccgggagcgagtgctacggttcaggtgcgtggtgtgacaacaatgtctgattcgagtccgcttatccttgtcgatggtatgatggtcagtagccttgacaatatagcaagcgaagacgtacagcagattactgtacttaaagatgcagcttctgcatccatctatggtgcccgtgctgctgccggtgttatcttgataacgactaaggaggcaaccgagggacagctttcgatcggttataacggagagatttcgttgtcttctcctaccgaatttccgaaattcctgacagacccttatcactacatgacaatgtacaatgaatggtcgtggaacgatgccggtaatcctgcgggaggcgagtttgccaactattcacaggactacatcgacaactatgctaccaacaacaggtatgatcccattcaatatcctatctatgactggaaagacgctattctttcgaataccgctatgcgccataagcacaatttgactatgacgtatggcaacaaggtaatcaagagccacacttccgctacctacgaaaatgccgacgctatctataaaggttcaaaccacgaaagaatctctatccgttcgcgtaataatctcaagattagtgataagctctccggttctatcgatttctcggtacgttatgccacgaaaaatgacccgacttccggtagtccgattcgtgcagcttatatgtatccttccatttatttgggactttatccggatggccgtgttggtcctggtaaagatggcagtcttagcaatacgcttgccgccttattggaaggcggagagaagaagaccgtatccaacacaatgaccggtaaattctcgttgagctataagcccataaaagatttgacccttactgccaatctgactcctaccgtcggaactgtttcgatcaaggagatgaagaaagccatacctgtttacgatgcatacgaaaccgatgttatgctgggatatgtttcgggatatacttccaattcgctaagtgaagaacgccgtaacatcaaatcattggagaaacaattcatcgctacatacgacaagaccttcagcaaggtacataacttcaatgccatggtcggttatgaagattatagctatacgtatgaaacgatgtcgggatcgaccaacgatatgtctttgtcttctttcccttatcttgatctggcgaacaagaatgctcttgccgtagccggcaattcttatcagaatgcataccgttcattttttggtcgtgtcatgtataattacgacagtcgctactacctccagctcaatgctcgtgaagacggatcttcacgttttcacaaggatcaccgttggggattcttcccgtccgcatcagtgggttgggtcatctctaacgagaagttcatgcaaaacataaccccgataaactatctgaagttccgtgcctctatcggtacgctcggtaacgagcggattgggaattatccttatcagacatacatttcgttcaataatgccattatgtatgacagtgcaggttctacgccccaatcttcgatgtctgccgctcaacaggattatgcgtatgagaatattcattgggagaaaacacagagctgggatataggtgtggatgccgctttctttaacaatcgtcttgactttagcgcagactattattataagaagacaacagatatgcttttgtcggtggcaatcccctcgtttacaggctattcggcacctgacaggaatgtaggtaaaatgcatacccgtggttgggaagtgaaactcggctggtctgaccgtatcggagatgtaaattatgcggtaagttttaatatctctgattacaagtctataatagataatcttaatggcaagcagcagtttaacagcgatggtaccattattactgaaggtgcagaatataactcctggtacggatataagactgcaggtttgttccagaccgcagaggaagtcagtgaaagcgctctgctttcggcttctaccaaaccgggtgatgtgaaatatgtagatgtcagcggtccggacggcactcctgatggaattatcaatgagacatacgaccgtgtagtgcttggcagctcattgccacactatctatatggaggttctattagtttgggctggaaaggtctctctttctccctactcttcaatggtgtcgggaaacaactttcacgcctcaccgagagtatgattcgccccatgcagggacaatggcttccggctccgtcagtccttctgaacgacaatggcagccgtaattattggagtgtgtacaacactgcagaacagaacgcggcagccagctatccccgtttgagtcatcagggcggtgaatacaacaactacaaaatgtcggattactggctcaagagtagtgcctatatgcgtataaagaatatcaacgttggctatacagttcctaaaaaaatcgtctctaaagtcggaatcaagggacttcgggtgtacgtcaatatcgatgatccatactgctttgatagttatctttcgggatgggaccctgaagcaggcgcttctacctatatcacacgcacttatacatttggagtggatatcaaattctaatggagtatgaaaaaattacataatatgaaaaaaatacatgtattgatttgcatgatagctcttctatctgtaacttcttgtgtgaacctcgatctgaatcctccttcagctgcatccagtgaaaactggttctcgtcaccggaggaagttcgaatctcgttgaacgatttttatcgcagtactttctttgttatagaagaaggttggacgctggaccgtaatacggatgactgggcacaacgaaccaacatttataccattgcggcaggttcactgaatgcgtcttctacaagtaatcctaacatcaagactgtttggagttacacgtacaagaacattagtcgtgccaaccggattttggaggcactcgacaaacttgaaggcaaatattccaccactgaactgaatacgcttcgtgccgaagcccgttttttcagagcatttgcttattcacgtttgattactctttggggagatgttcctttctacgtgacttcgattactccggaggaagcatttgagatggggcgtaccgacaaagctgtcgttctgaaacaaatttatgaagattatgactatgccgcagaaaatttgccggccgcaaataataatagcggcgccacccgtgtagacaaaggaacggcttatgcttacaaggctcgtactgctctctatcaacacgactacgggactgccgcaaaggctgcgcaagactgtatggatctggaagtatatgacttggcccctgattatggagaacttttccgcgacaagacaagaggaagcaaagaagttatcttctctgttgctcactcaagcgaccttgaattggatgaaaacggtcagcctactacacaggctatcggttccttcattgcccgttcggcaggcggtacacataatgcgcaaccttcgtgggaacttcttgctgtctacgaaatgacgaatggcaagacgattgatgaaccgggcagcggttttgatcctcacgatccatttgccaaccgcgatccccgttgcctggaaacatttgctgctcccggcagccgtatctatggtattgagtggaatcctgcgccgaacgcactcgaagtaatggactatacgcaaaatcgtatgattacaaataaagattccaaaggcggttcggatgcttccaactgtgcttacaatggttgctgcctgcgcaaaggcgcgcaagagtcatggcgtactactttgtataacgacaaccccgtcattctcatgcgttatgccgatgtcttgttgatgtatgccgaagctaagattgaactgggggagattgacgctactgtccttacttgcatcaacgatatccgtgcccgtgcttatggcaccacccgtacacaaaccaacgactatccgtccattacgacaaccgatcaggcagcattgcgcaaagtgctccgccgtgagcgtcgtgtggagtttgcatgggaaaatctgcgctatttcgatttgcttcgttggcatcagtttgagaatgctttcggacacaatatgtacggatttacccgtacagccaacagggcaaaggaatactttgcggcaggcaactggttttggccggagactccgacatttgacaaagacggatttccttcttttgaagcgatggccgacggaacctatatcgtccagcatggtgaacgtaagtatgatgagaagatttatttatggccattaccaagtgatgatgtattgataatgaatggaaaacttgttcaaaatccagggtactaactttattaaataaatgatattatgagcattggagaaattttattgcgcagtcgctatcaaccattggaaagggtgttgagctatgatgtattcaacaccggctttaacggctggatgacattaatgcctaactttacggaatatcccgattttgatgttcccaagacattggtcaataaagaccagtggccaccggtcatgcttagttccgctactttcaggtatccgggtactcacggagctatgtccggcacttactctcttaaactttcgacaagacctgttgccgctccttatacggagattccggcggaaggttgtctgggacatgccattaagcggctttcgttctctcgtccgggctgcaaatatttgcagatagaatgttggtttacatacacggcggagcaggatgtggtggatggcggtgaccgtccgcaaccgggtttgcatgagagttccatccgcgattttggtatgggattcgatgtacaggagggtggaaaacgttaccatgtaggaattcgctatctcaatgcagtagatggcaaattaatgcagaagtggcagtatgaacattccaatgaagacataaccgaccgcgattgggcttatggacttgacggagactggtgtaagaggggagtcgatccctggtggttcggccgccgttatcctaatggcgaccacgatggattcaaggatttgaaagatggtcatcagaaactcatttataatgaaaccgactgtaaactcaattggcaatacatgcgtctgaaacttgacacagagcttcgtgaatatgtagagttccaatgtcaggacaaaatttgggatatgcgtggcattgcagccgataccgttgacggatatggacgcatcgacaatcttatcaatcctcttttctgggtgggtactgataccaatcgtcgtgtattcttttatatagattctgttgttgtttcacaagaataaaaggaggaatgtaatatatgaaaatgtttaatgattcccatcttgaggtaaagaagttctttaaaggtactttcttcactcatccttacgaggctggttgggcagatgaggctatattctttgttatggttgagaaaatagaaggagatcccgtattcgaaggtcgtgtacaactatcgcaagacggcatacattgggctgacgacggtagtgatcctgtaatcttcaaaggacttggccaacatattataaaggtaaattcaaattttggtaattatattcgtcttgccgtcagcattgaaggcggagagatgtttttaaatcttcatatagcatgcaaaggttaatatttatacttagtctgttcattcttgcgattgtaggatgcagttccaatgagtctcactcatttttgattcgtccggatggaggtggggaagatgctgccactgaaatagaggtaggtaaaacgattcctgcctggcaggagggtgtgatggatattcatttcatcaatacgactaccggtgaaagcatgtttgtaatattcccggatggtacgcaaatgcttatcgatgccgcaagttcgagtgttacgaccaactctaatagtaatacgaccaataccggtatccgtagtcgttgggatccgactctgacttctacccgtggttcacagattataactgattacattcgtaagtgtatggtatggacaggtaacagtacgattgattatgccgtacttacccacttccataatgaccacttcggcggttatacttcttccttgccgaaatcttccaactccgacacttattcgttgataggttttgccgagattttcgacaatttcaagattggtacgcttcttgatcgtggctatcccgattataactatccgttcaatatggcgacaatggcagacaatgctccaagttgcagcaactatatcaatgcagtgaaatggcatgtcgccaatcaaaagtttgatgctgcgatattcaaagcaggggcgaataatcagatcgttcagaagtataatcctgcaaagtatcctactgcaaaggtgcaaaacgtggcagtgaatggagagatctggacaggttcgggcactaccacaaagaagacattccctgaactctcggagatttcatacgaaaatagtaagaacattacctccagtgacaattgtccgccggagaatattaccagttgtgtgatgaaagtttcgtatggcaactttgatttctttgccggtggtgaccttcagtataacggacgttcgagtcatgcgtggaaagatgccgaactgccctgtgcaaaagcagtaggtcaggtggaactattgaaagctaaccatcacggggtaaccaacaccaatcaggtggatgctctgaaagcactcaatccacaaacgattgttgtcaattcgtgggtagattgtcatccccgcaccgatatactgaattcgatggagacaacactccctgcgtgtgacatgtttatcactaacttctggcaaggcgatcgccccagcggagtagacgaccgggttacggcggaagaggctgcgagagtaaagggatatgatggacatattgtagttcgtgtgaccgacgggggaaacaaatatagagttgtgacaatcacagattctgacggggcaatgactgttaagactatttccggtccatatacaagcagataatgaatacaaaatattatgatgtaatagtagcaggtgcaggtcctgccgggatatgtgcggctgtagccgccgcccggcaaggagcacgtgttgctcttatcgaaagatacggagtcatcggaggtaacctgaccgccgggtatgtcggccctattctcggtagtgtaagcaagaacacgatgcgcgatgaggtttgtgctattcttggcgtcaaagacaatgactggattggcgaacatggaaatgctcacgatttcgaagaggcaaaacttacattggcagaatttgtcgccagggaaaagaatgtcgatgtctttttgcaatgttgcgtgtcggatgttattcgtgacggaaaggtggtaaaaggtattaagtgtgcaagtaacgaggggacgctatgttttgaagccgcggttacgattgactgtaccggtgatgccatagtatcttttcttgccggtgcaaaaatagaaaaaggacgtgctgacggactcatgcagcctgtaacccttgaatacactattgacggcgtagatgaatcgaaaggaattatctgtattggagatgtagacaatgtccaattgaatggcgagtgttttcttgattggtgtaaaaagaaagccgatgagggcgaacttccccggatgcttgctgccgtgcgtttgcatccgtcggtcagaccgggttgccgtcaggtaaatacgacacaagtcaatagggtggatataacttcggtaagctctattttcgctgccgatcttgaacttaggcaacagatacgtctcctgactcaattcttgaaagaaaatttgccgggttacgaaaattgtagagtgatcggaagcggtacaacaaccggagtgcgcgaaagccgcagggtgatgggcgactatgtgatcgatgccgatgagatggcagaaggctgccgttttgccgatgtggtggtacataaagcattgttcattgtcgatatacataatcctgacggagccggacaggcggaaccgaccatccaatattgcaaaccatacgatttgccgtatcgttgttttctcccgttgggcttggaagggcttttggtggcgggacggtgcatatcgggtactcacagagctcacgcttcctatcgtgtcatgagtatttgcatggcgatgggagaggctgttggcattgccgctgccatgagtgcgtcgcagcattgtactccgcgggctctcgatgtaggagagttgcagaaacggcttgagtcgttaggcatagagctgttcgattaacgtagaacataatcatactttaaatttatagagcatacttatgaaaaagatctatttgtctgtcgtgtgcttactgatctctattccccttatcgcccagttgtatgtagagccggagaaagaggtagagtgctctgtcttcctggcaaaggaaggacgggggcgggcacagcaaggacttgaaatatgggatgattacatattctcgtgcgaggatggagggcacgtgaatatctatgatttcaaaagtgccgatccgaaacctgtggcaggctttgagttggcgtcctcccatccggacaaccatgtaaataatgtatgctttggcgtcgagacaaaacgcggagcatcgtttcctctcttgtatatcacaaacgggaaggtaggaagcgagttggaatggttgtgttttgtggagagtatcacccgtcgtggaaaacgttttagcagcgaaatcgcacagacaattgaacttgatggctcgaagtgggcggagaaagggtatgtccctatctttggtgcgccaagctggctggtcgatcgggagcggggctttatatggatattctcggcgcgtaaacgtactgtggcgaaggtgacaaagcatgcatgggaaaaccagtatgtcgccactaaattccgcataccgtcgttgagtgagggggcaaaggtgcgccttgacgaaaatgacattctcgatcaggtggtgttcccctatgaggtatggttcacacaagcgggctgtatgcatgatggtaaaatctatttctgcttcggagttgggaaacaggatgacagccgtccttcctgcatccgggtgtacgatacggataggcggacgattactgcccgatacaatgtgcaggaacaggttatttacgaaccggaagatattgtggtcaaagacggggttatgtatgtcaataccaatacgaatgcgaaaaagacgtctgatcttccttgcatattcaaactctctcttccgaaagaaaagccggtgaccgaaaatcctctcgacgagatacgcagggatccggaacgtgcgggcggcgtgtattatgtgaccgatctttcacatccggttacgccggcgcccaaaggatatacgcctttctatataaacggctatttccgtcacggagcgcgtcagatagacgatgaggtgacttatcctgctatatacggcgtattggagaaagctcatgccacaaacaatcttaccgattttgggaaagccctgtacgaacgtcttgaaccgttcaagaagaatgtgttttacaaagaaggcgatctgacacaaatcggttatcgtcagacaagggagataggccggaggatggtacaaaactatccggaagtatttgaaggccatccctatttgaagactaacgcaacgaatgtgcttcgggtggcggccaccatgcaatctgtaaattcgggtattttgtcgctacgtcccgggcttgagtgggcggagatagacaattcccgttcgttccttaccacactgaatccatacggtaacgtatgtcccgacagaagtccgcttgataaatatatactcggtaaagaaaacagttggtataaaaaatatcgttcatatatagatgaaaagttgaatgtggatgctttttttacaagactgtttatagacgtaacacaagtagaaagtgaatatgacaagtacgacctgatccatcgtttctggttaatggcatcacttatgcaatgcctcgaccgccaagtgcctatatgggatatttttacagaagaggaaatattggcttgggcagaaatcgagaactataagtattttgcgcagaaaggtcctgaaccggtatctcacgggcgtagttggggacttgcatcccgcacgttacgccatttgttagacgaatctgccgaagatctggttcgcaagcgtcatggtatcaatctcaacttcggacacgatggcgttctgatggccatcttgacaaatctgcaagccggaacgtgggcgcgggaggctggtaattccaaagaagcgttgcggagttggaagtactgggatattccgatgggtgcgaatcttcagatgatcttttaccaatcagaaggcaatccggacgttttagttaagtttatgctgaatgaaaaagacctccggttgccgttggaagcggttgaagcatcttattacaaatggaatgaggtttataaattctatatagaacattgcgacaaggtggaaagatcacttgccgaaacattgaaattatcgtatgaagacttttaattataatcgtgctgaaataaaggccggaatagtacatttcggcgttggaaacttccatcgtgcacatctcgaagcttacacaaatttattacttgaagatccgtcacaaagatgctggggggtattcggagccatgattatgcctacagacggggtattgttcaacgccctcaagaaagatgacggcatatatcagttgacgacatgcagcccttccggcgaacaggatagtatgctgattggttcgcttgtagaactggcatggggggaaatagatagtgagcctatcatcgctaaaatagcatcggaggagataaaaatcatctctctcaccattaccgaagggggatataaggttgattttaaccaatcgcgcagtgtgttctggtatgtagccgaaggacttaaacgtcggatggagaaagatttgccgattacgattctttcgtgtgacaacatgcagatgaacggcaatgccgccaaatgtgcgtttatgtcatacttcgaagcgaaatatcctgaggtggcagcgtgggcgaaaaagaaagtgacgttcccgaattcgatggtggatagaatcactcccgtaacaaaaccgggtaaggttacagatgtgtgttgtgaagactttatacaatgggtgattgaagataatttcattgcaggccgtcctgcatgggagaaggtgggagttacattcacccatgatgtgaccccgtatgaaatcatgaaattaagtcttctcaatgcgtcacatactcttctttcttatcctgcctatatggaaggattcaggaaggtcgatgctgtaatggcagacgagaggtatcgtgcaatgataaagctgtttatgaacagggacgttactccttatgttccggttcccgaaggcgttgaccttgaagcgtataaagaccagcttattgaacgattttcaaacaaggcgatcagcgatcaggtatcacggctttgcggcgatggtattgctaagtttgcggtttatgtggtacccatactcaaacagatgttgcaggatgggaaggatatttcgatagaggctttcctgatagctgtttattgcaaatacctgataggtgcgcgcaccgagtccggtgaaaatatagctatctccgaacctcacatcactccggcggacaggaagttgatttcgggaggatcgccggccgagttcttgaagatatcaccttttgtgtcattgggattggacaaataccctgtgtttatggaaaagtatgagcagttttatgctatgcaggtagcagaagggttgaaggtcttattacagtaaacaactaaaaaatacaaggcaatgaagaagtttttcataacggttgttctgtcgctttcgtgcgtattgtcggtttcggcacaaaaacagacggaggcgtcaacgcttaacctgataggtaagccgtttgaatcgactcccaatccgtatcatagagtcgatacattggtttataaaggttttaacaggacggagaaccgacaactccgttgttctgccggtatggctgtgttgtttaaaacgaacacgcgtaatatacagattacgacaaagtggggatatgtatattcgagccattcaaccatgccgatctcttataaaggatatgatctttatatcaaaaatgcaaacggtcaatggcagtatgcggcaagcggttcattgaaagcgtataagggcgagaaaaccgagacattcacgctcattgagaatatggatggtacgatgcacgaatgtatgatgtatatgccgatgtattcggaggtcatttcttgtaagatagggatagatgacgatgctgttatcgaaccgttgaagtccgattttcgtcacaggatagcgatatatggctcttcgtttacgcagggagtgagcacggatcgatccggtatgagttatcccatgcaatttatgcgtaatacaggtcttcaagtcgtgtcgctcgcaacaagcggacgttgcctgatgcaaccttacatgctcgacgttcttgcggaagtcaaggctgatgcctttatattcgatactttttcaaatcctgacgcagaactgataagagagcgcctgatgccgtttatcgatcggcttatagcggcacatccggctattccgttgatatttcagcgtactatctatcgtgaacgacgttcattcgatacagttcttgatgcgaaagaacgggctaaggcggcaaccgtagaggagttgtttgcgaaaatcctcacgaacccgaaatataaagacgtttatctgattacgcctgatgcttccgatgcgcatgagacatcggtcgacggaactcatccaagtagttatggatatgcactttgggcgaagtcaatagagactccggtaatagaaattttaagtaaatatggtataaaatgagacaagcggtattagtagaaccaaaacatattgaatttcgcgaggttgaggcgcctaaggcgtcggacctgaaagaacatcaggtgcttctgaatattaagagaattggtatttgtggaagtgagatacattcttatcacggatgtcatccggcaactttctatccggtagttcaggggcatgaatattcggcagtggtagtcgctacggggatggcggttacgatctgcaaggcgggtgacgttgtcaccgcacgtccgcaactcgcgtgtgggaagtgcaagccttgtcagcggggagagtataatatttgtgaagagctaagagtgcaggcttttcaggcaaatggagctgcgcaagacttttttgtggttgatgatgacagggttgcggtgttgcctgaaggtatgtcacttgattatggggctatgatagaaccggtggcagtggctgcgcatgcaactatgcgtggcggggacttgaaaggtaagaatgtggttgtatcgggtgccggaacaatcggtaacctcgtggcgcagttcgctaaggcaagaggagccaaacgggttcttattaccgatgtaagtgatttcagacttgaaatcgctcgtaaatgtggcataatagatacgctcaatgtagctaagacgccgctcaaagaaggagcgaagaggcttttcggggatgaagattttcaagctgcgtttgaggttgccggggttgagtcgagtattcgttcgcttatggagtgtatcgaaaaagggagtactatcgttgttgtggcggtatttggcaaggatccgtcgcttaatatgttctatttgggagagcacgaactgaaggtgaacggaacgatgatgtatcgccacgaagattatcttacggctatcgatcaggtaagttcgggagctatttgtctcgaaccgcttatttcaaatcattttccgttcgagcagtatgacgaggcatataaatttatagacgagaatagtgcaacatccatgaaaataattattaaactataaaaccatgaaaataataggtataggagaagttgtttgggattgcttcccggaaggtaagagacttggcggagcgcctatcaatttctgtttttttgcaaaggagttgggagcagaatcatatcccgttacggcaataggtgatgacgaactcggtgatgaaacatttgcggtgcttaaagagaccggacttgatttaggatatatttcccgtaatattttgccgacaggtaaagtgcttgtgtcgttgaatgaggccggtgtaccgcaatatgacattgttgagaatgttgcttgggatgctatcgagtgtagtcctgcgaccatgaaacttgtcagcgatgcagatgctgtttgttggggctctttggcacagcgaagcgaaaagtcacgtgctgcaatcttaaggctcatagatgccgtgccagatacctctttgaaagtgtttgatattaatatcaggcaacatttttattcgacagacttgattgtggaatccttgcaaaaagcaaatgtgctcaaattgaatgaagacgaattgccgttattgatctctcttctttctctttcgactgattttgtggaagctatcacagaactcatagctcgtttttcgctcaaatttgttatattcacacagggcgcagtacgtagtggcatatatgatgacagtggggaaatttcatccatagatacacctaaagtcgaggtggccgatactgtaggtgcaggcgactcgtttactgctacctttgttgtgaacatacttagaggggcgtcggtcgctgaatcacaccgcaaagcggtagatgtatcggcatatacttgtacacaaaggggagctattaatccgttgccggatagtaaaaagtaatattgggtacttcacataaggaagtttcgtacttggtttgaatgattcttcaaaccaagcgtggtggatatgccttgttcttgttgattgcagtttaattccgttagttaaccgcagaatttgcggcttagcatacctcttttggccgcattttatagataactccagttaaatagttatttttgcagaaataactgatggtatgtttatccatgaaatagaaaattggagttcattcagatggaacatcaaaagtttgtcaggtgaaatagcctggataaatagggctatagtctatctcgtggagcggttgagtacaattggatttgaatagtaatttttacgaaataaaggaacccatgttgaaaatattagtaacctacgccgtacaaggcgaatttgtagagattaaatggccggatatagaaccttactacattcgtacaggcattggtaaagtgaaatcagcctttcatttggcagaggcaatccgtcaggtacaaccggacttggtgcttaatatcggaagtgccggaacagtcaaccatcaggtaggagacatctttgtatgccgtaagttcgtagaccgtgatatgcagaagatggcagaattcgggttggagtgtgaaatcaattcatcggctttgctcgaaggaaaaggatattgcacgcattggacggaagatggaatctgcaatacaggagatggcttcctcaccgagttgacccatgttagcggagacgtcgtggatatggaagcctacgcacaggcatttgtctgccgttcaaaaggaatcccatttatttccgtgaaatacgtgactgacattattggtcagaactccgtgaaacattgggaagataaacttgccgatgcacggcaggggctatcgcattactttaacgtcttgaaagaaagaatatgataagtgactcctgcggctatcaatcccaggagaatctttacccatataaaaggaatcaggaagaaaatgcaataaagcatcgttccccacattaatacgagagaaattattttggcacggagaggaatcgccttgttttcgcggaaattgcggatgtaaggaccgaagtgccgatggttgagcagccagttatataatcggggtgaccctttgaaataaagggcggcggtgagcaatagaaaaggggtagtgggcagtagcggcagaaagatgccaagaataccgagcgcaagggaaatactacctaaaacaatatatagagttttcatgcggcaaagatagtgcaaaaaaaggaaaaaaataacactcttagctggatgaaaactctattttatattacctttgccgttgcatcgaggtgacattagatgcgtgtaactattaaaatacatacactcatgtttacagtaatcaaacgcatggagatctcggcttcacataagctggtactcccgtatcgcagtaaatgcgccagtttacacggtcacaactggattatcaccgtctattgccgttccgcgcggctcaactccgaaggaatggtggtagatttcacccgcatcaaagaagtagtcacggagaaactcgaccatcagaatctcaacgaagtactcccatttaatcccacagcggagaatatcgcccggtgggtatgcaaacagattcctcaatgctataaagtagaagtgcaggaatcggaaggaaacatagtcatctacgagaaagatcccgtcggcgcagaaggacaagaatagcaaaccaaacaaattttgatgatgagaaagattaatgaaatcttttacagcttgcagggcgaaggctaccataccggaactccggccatcttcgtccgtttttccggctgcaacctgaaatgtgacttttgcgacacacaacacgaagaaggaaaaatgatgaccgacgatgaaattatcgccgaagtgaaaaaatatcctgccgtcactgttgtcctcacgggcggcgaaccttccttatggatagacgatgaattgatcgaccgtttgcatgaggcaggcaagtatgtgaccatcgaaaccaacggtacacgccccctgccggcagctatcgactgggtgacctgttcccccaaacaaggggcgaaacttgccatcgaccggatggatgaagtgaaagtggtctatgaaggacaagatataagtatttttgaactacttccggccgaacattttttcctccagccttgttcttgtaataacactgcttcaacagtggactgtgtaatgcgacatcccaaatggagactcagcctgcaaacacacaaattaatcgacatccgttgaacaaaatagacgggtgatacgggagaagcttaaattattacaaaatatagtatgaaagtaggtttgtttattccttgttatatcaatgctatttaccccaatgtgggagtggcatcgtatagactattgaaaagtttgggagtagacgtcgattatccgttggatcagacctgttgcggacaaccgatggcaaatgccggttttgaagatgaatcgatgaaattggcactccgttttgacgatctgtttcgggaatacgattacatcgtcggtccttccgccagttgtgtggcgtttgtgaaagagaatcatcccggtatcttggagaaagaaggacatgtttgtcagagtgcgggaaagatttatgatatttgtgagttcattcacgatgtcttgaaaccttccaaaatacctgcacgctttcctcataaagtcagtattcacaatagctgtcatggggttcgtgaactgttgatttccgctcccaccgaactgaacatcccttattacaataaattgcgtgacctgctcgatctggtagaaggcatcgaagtattcgagcccagccatattgacgagtgttgcggctttggcggaatgtttgcggtggaagagcaggcagtctccgtctgcatggggcgtgataaggtaaaagaccacatggctaccggagccgagtatattgtcggagcggacagttcctgcctgatgcacatgcaaggtgtcatcaaacgggagcatctgcctattcagattatccatattgtagaaattctagcgtcgcaatcatgagtacaaaacattcaaaggctgccgaaaagttcttgcaggacagcaagatggcagcatggcataatgaaaccctttggatggtccgtgccaaaagggataagatgagcaaggaagttcccgaatgggaagagttgcgcaacaaggcttgcgagttgaaactatactccaacagccacctcgaagaacttctgctggagtttgagaagaatgctaccgccaacggcgccatcgtacattgggcaaaagatgccgatgaatactgcgccatcgtctacgaaatactgaatgagcataacgtccaccatttcatcaagagcaaatctatgctcgccgaagagtgtggattgaatcctttcctgatggagcggggcatcgatgttgtagagtccgatttgggcgaacgcatcctgcaactgatgcatctcgaaccgagccacatcgtactgcccgccattcacatcaaacgggaacaggtaggcgaacttttcgaaaaggagatgggcacggaaaagggaaactttgaccctacctacctgactcatgccgcacgtaagaacctgcgtcatctcttcctcaatgccgaagccgccatgacaggcgccaactttgccgtcgcttcaaccggtgacattgtggtctgcaccaatgaaggaaatgccgatatgggtacttcctacccgaaactgaacattgccgctttcggtatggaaaagatcgtcccggatttggacgcattgggtgtgttcacccgattactcgcccgttcggccaccggacaaccggtgacaacatatacctctcattaccgccgtccccgcgaaggcggtgaataccatattatcatcgtagacaacggccggagtgccttactatccaagcccgaccatatcaagacattgaactgtattcgttgtggtgcgtgcatgaatacctgcccggtgtaccgccgcagtggaggttactcttatacgtacttcatccccggacctattggcatcaacttgggtatggctcacgctccggagaaatattatgataatctttcggcctgttctttgtgtatgtcctgttccgatgtctgtccggtgaaagtagatttggccgaacaaatttacaaatggcggcaggatttggacggactggggaaagccaatacgggaaagaagatcatgtccggcggtatgaagttcctgatggagcgtccggcattgttcaacgcagccttgtgggcagccccggtggtaaatggcctgccccgtttcatgaaatacaacgatctcgacgattggggaaaggggcgtgaactgccggaatttgccagcgagtcgttcaatgaaatgtggaagaaaaacaaagtacagggaaaggaggaatccaaatgagcagcagagaagaaatattagccagcatccgccagcatacgcagacgcgttatgataaaccggatattgcggatatgaaacgattgtcatatcctgacaagatagaacagttctgtgcaatcagccgtgcggtgggtggtacggcagttgtattgggtgaaggggaagatgtgaatgcggtcatacgccggacttatccgaatgctatgcgcattgcttccgtattgccggatatttcctgtgctacgttcaatcccgataatctggatgatccgaaagagttggacggcacagatgttgccgtagtgaaaggagaaatcggagtagccgaaaacggagccatctggataccgcagacggtgaaatataaagcgatctattttatctcggagaagttggttattctgctcgaccggaataaaattgtagataccatgtatgacgcctaccgcgaactggacggacaggaatatcagttcggaacgttcatctccggtccgtcaaagactgctgatattgagcaggctttagtgatgggagcgcatggggcacgggacgtgttagtgatattaacctaatgtttctctgttgattattctaaaataaatttggtttcaaaacaatggagttttatatttgttagtacaaacgaaatggagactctgttgatgctgtaaaaacagaggctctattggtaagaaatagagcctttgtttcatataaacagagcttccgtttgatgtaaatagaatatctgtttctgcttgtccatagtagataaatgagttcgtaggataagagtagtaaaacgtttaattataaattatatgtatgccaataaagtaaagaaaatagccgccgtccatgacctttcgggaatgggacgcgtatctctgaccgtcgtcattcctattctttcatccatggggtttcaggtctgtccgcttcctacggctgtattatccaatcatacgcaatatcccggtttctccttcctcgacctgacggacgaaatgccgaaaattattgcccaatggaagaagctggaggtagaattcgacgctatctataccggatatctgggttctccgagacaaattcagattgtttctgattttatcagggactttcgtcggccggacagtttgatcgttgccgatccggtattgggagataacggacgattgtacaccaactttgatggagagatgataaaagagatgcgccacctgattactaaagcagatgtgattacccccaatttgacggaactattttatttattggataaaccttataaagcagataacacggatgaagagctgaaagaatatcttcgtcttttgtccgacaaaggtccgcaagtggttatcatcaccagtgttcctgtacatgatgagcctcataaaacgtctgtctatgcttataaccgtcagggaaaccgctactggaaagtgacctgcccttatctgcctgcacattatcccggcacgggagatactttcaccagtgtcatcaccggctctttgatgcagggagacagtctgccgatggcattggaccgtgccacacagtttatcctgcaaggtattcgtgccactttcgggtatgaatatgacaaccgtgagggtattctgttggagaaagtgcttcataatttggatatgccaatacagatggctagttatgaactgatttaagataggctttgtgttgttattactatgccaataggttggcacaacaatgccaccttgtttgcatgtctgtgccactgtgttggcacaaatgtgccttcttattggtatttattaagttcagaatcgtactgttactcttgccgggagttttccacttgtccacttaggtccttctttgacaagccggatggcttctttatcagcgaattcgcataatccatgaataacagtgatattttgcggctttccttcttcatcaacaaagaaagaaaggactaccttccccttaatatctttacagttatcatccgttggacgaacgagattctctttcaggtatttctgatagctacgtttaccgatgacaggttgtggagtgatctctttctctgcctgttcctcaaccttcacaacacttccgagggttgttgacttcttatttttcttagcgccatatcccactaccaccacttcattgagtgtctgtttgttttcgttcatggcaatgagcatcgtccggctggtatctacccggatttctaccggatcatatccgatatattccgctgtcaatcgtttcttatcatcctttttgactaacgaaaattctccattcatatttgtgatggttccgatattcgttcctttatatgtcacactggctccgataagcggttccccttttttgtcggtcactattcctttaatcatgttattttggggaaggatagtcgctaccttagccatcttcattttcttatctgattcagattcgaaagtatctatcgttgctactacttcttgcaatgcagcagtctcttccgagacttcttccatcatcggcacagctgccacaggcgcaccttgtggttgcgaagtcgtttggattttggcaatcatttctttcttatccgcttgtctcgcagtaatttcggaaataggagtggaatccgtttttacctttgtagtagctaatgcgatttccttttgcggagttgcgggaactgttggagtggcaggaattgccggagttggtggagctgcgggttcagccaactttgtggaaacactctcttccgcaatgaacacttcatctgtcatgctctttttcaggaacaggaaataactgctgataccgaatccgataatcagacacgcagcgatgctccaggtgatagcataagtgttctttttctttgccgaatgagcagaaacctgcatccgcagtttctcgatccgttgttcgtgatttccctccacctggttgtatccatccatagcatcggccaggaaagggtcttgcatcgactctttttccagccggtgtgcctcttttcctttgcggagtcctcgtatgtagtccaatagtttcatagggcttgtttcttaatacaaatttttaagtttcgctttccgttttggatatagcttttcacattgttcagagtaaatccggtctgttccacaatgtcggcatacgacatttcctctaaaaagaaacgcgtaatgctggtccgttgttcttcgggcaacttttcgagacagtgatgtaatgcctttagttgttcttctgaactttcctcctcacttaatagatgcagaaattcgtcggattccataacattaacggtataatctaacgtaatttctttattttcctttcgtaaaagttgcaagcaatgattctttgccacccggtagagccatggcttgaacacttttatctcataatttcccaatttaggcaataaatcttcaaacaactgcatgaccgcctcctgtgcccggtcttcatcatgcagatatttcaggcaaagtccgtatagtaacgggatatatcggttatataattcgccgaaatattccgtatcaccggacttcgtgtaatgtattagtaattcctcgtccgatagttttgatatttttcttttgaaaaacaacatctattcctcttcttcgtcaacaatgacttgatatttttctttcattgcttcaaaatcacctgtaatctggtctaatatttcatgcgtatccgtactctttaccaatgcgggcataccgtaatagatagatgctttatatggcaacagtatcatttttcctttgggcagagaacgtcccataccggtcatgaatacgggaatatatttcacttcaggccgcagagacaggatgcgtgctatgccggatttaatttttcccatttgttccggctttcctctggttccttccggaaaaagaatcagtgaatatccggcatcaatggcttcgagcatcttgcgaatcggatcatgttccgaatctttttccccttttctcctgattaaaagagtattgatgaaaaagttgctgatggaagcctgaaagcgggttttcccgaaatagtcttctgctgctacgggtttgactttccacaaaagttcgccgggcagggaagccaataggcttagggtgtccaggtggctgttatggttggcaaggatgatgaattgcttttcctttttgaggaactggcaatcggtgaactgaactcccacaaccaatttcagaaaccattggaatacacctttatatataatctgcatggcagcagcttgcatgaatcttttttccattctctccgtttaatatgcaatgtaataaactaaatgaaaaaatacaggagccgtgtaggccagagaatctatccggtcgaatactcctccatgaccgggaatactgttccccatgtccttaattcctttatctctcttgatggcggagatgactacgtctcccgagaatccggcaatcgcaacgagagcacttaccaggataacgttgggagcggagaggggagtcaggaaaccgaggaagtaaccaatgacggtagtactgattacaccgcccagaaatccttcccacgttttgttcggacttactttcgggagtatcttatgtcgtccgagaagtttgccccagataaattgcataacatcgttgatttccgtaaggaatacaaggaataatagcagacctcgtcctcctgcattgaatcccggaagttcaggaagcgacaggagataagcgaggtggctgataccgaatactgaaagcatcagaatccactgcaacagagccatcgacttggtaattccgtgggtgtctccctttaaaacaagtcgtaagggcaatacgagaaacataactaccggaatgaagatgatgaatgctccataccaggcaaggtaagcaaggtaatattgaatgggaatggccaatatcccccaaaacaatgctccgcgatctgcctctctgaatcccaacaccgaatacagttctctgaaagcgatgaaagagagaaaggcaaggaagaagtaagaaatgttataactgataaatacagcgccgataaacatgcccgccatgatccaccatgaacgcgtgcgggcggagagttcgctgatatttgtttttggagagatcttctttacgagaaaaagaataaggcttgccgtaacaagcagtccgatgatgagcgaaatgacgataatcaattcatcgcttagcgtaggaaatatgatatccagtagttctttcattttatttcattgtttgttgtgtgtgacatgaggtacagacggtgtatcagtgttgcgacaaggccgacgttgattattatcagagctatgagacataccatccggtcgtatcctgcgtgaatggtgcaggtggctactacaaaggcaagcgtgagcaatgccatgcggtgttgcttggccatcggaccgttaaagaaatgctggtgcgttttgtaggctcctatccagcggaaataagctgtcataacggcaagaagggccgctagccatcccagttcaataccgaatccacctgctatatatccgatgggaatgatgaacaaagcatcagcaaagcggtcgggcatatcattgtagagatctccgttggcacttttcttccctccttcaatagctaccatcccatcgaacaggttgcagagtaaccgcgactgcatgcaaacgatgaacagaatgtaggctacatacttgttaaaaccgggatcaatgactgtgccgatcaacagaaggcaccccaccatagcgaagaatacgctcatcatggaaatttgattgggagtgacaccccaatgagttagtttgcgggcaataatagtagcccaggccgtgtttcgtgaggctatttcccgccttccgtcgacttcgtttttcatatttataatatgtttatgatcggcaaatatacacatcatcttaagagttgcaaaggaatgagtgagaattttgaaatgactcttttttctgccggataaaaaaaagttcaggcaatttatggaatctgtgtgaaatgtgcatctctataataaaagcgaactaatagtaacattttaaaataagaagttatgaaaacaaatcaattcagagcgatgatgctcgtactgctaatggcggttatttctttaggtaggatgaatgcgcaagttattactgtgtcgggtacggtgacggatgcaaaggatggaaatccgcttgtaggttgttcggtacagatcaagggtacttcgaaaggtgcaataacgaatatgaagggccagtatacaattcaggccaagaagggggagacgttgttgtttcagtatatcgggtataagcaagagagaagggtggtgaaatcggctacgctggatgtgaagatgaaagctgatgatgtggtattggaagaatgtgtagtggtaggatacgggcatgagctaaaggctactaaatcggtgtctgctgcttatatggcggtatgtccgacaccgggaatcatgtatgatgctgtaaatgcggaagaatacgggcagattcaggagaatggatttaagagtgtgtcggatgctccgctttctactttctctattgatgtagatgctgcttcttatagtaatatgcgtcgttttatcaataaaggtgaattgcctcctgtagatgctatccgtacggaagaattagtgaactacttttcctatgattatccgaaaccgacaggaagtgatcctgtgaaaatcacgatggaagccggagcatgtccctggaatgcggatcaccgtcttgtgcgtatcggcttgaaagctaaagaaatcccgacggaacatctgcctgcatctaatctggtgtttctgattgacgtctccggctctatgtggggagctaaccggttggatttggtgaaatcatctctcaaattgttggtaaacaacttacgggataaagataaagtagctatcgtgacttatgcaggcagtgccggtgtgaaactggaggccactccgggtagtgacaaacagaagattcgtgaagcgatagatgaattgacggcaggtggttctacggcaggtggtgcgggtatcctgttggcgtataaaatagccaagaagaattttatctctaatggtaacaaccgtatcatactttgctccgacggtgattttaatgtgggtgtttcttccgccgaaggattggaacaattgattgaaaaagaacgtaagagtggagtgttccttaccgtattaggttatggcatgggtaattataaagataagaagattcaggtgttggcagaaaagggaaacggtaatcatgcttatatagataacttgcaggaagccaatcgtgttttagtaggcgaattcggcgctacattgcatacagtggcgaaagacgtcaaactgcaagtggaatttaatccttcccaagtgcaggcgtatcgtttgattggttacgaaagccgtctgttgaaagacgaagactttaataatgatgctaaagatgccggagatatgggtgcgggacatacggtaactgctttttacgaagtgattcctacaggtataaagaatgaatatgtgggtaaaatagacgatctgaaatatcagaagaaagagaaagtgacagtgaaaccgacaggctctaatgatctcctgactgtgaaactgcgttataaagcttcggataaagatgtcagcaagaaaatggaacttcctttcgttgataataaaggtaataatgtttcttctgatttccgctttgcttctgcagtggctatgttcggacagttgcttcgggactctgacttcaaaggaaatgccagttacgataaagtgattaatctggccaaacagggactgaataatgatgataaaggatatagaagagaattcatccgtttggttgaggctgccaaaggattggaaagaacgaataagaactaggaaatcgggcgggagtcattgtgagtgtacgctatatgactatgcgtaagattcgcagatatgaatgaacgtagaattccagatggataatcgtagaaaatcatagtgacggtatatgttcgggatagtgacgctatcgctgttgtataccgtcactatctttgtcggatagcgtcactatcatttatttcgtccgaatttcgtccgacctgaaacgaaaaatagccgtaaacttatcgtttacagctatttaactctgcacgggaggagaggctcgaactcccgacacccggttttggagaccggtgctctaccaactgagctactcccgtgtttgcggctgcaaaggtagtagaaacttctgaatctccaaacattcgggtaaataagttttgaattattttaatttttcccactcatcgggcttaaaaccgactagaacgaagctgtctgtcactaccaatgggcgtttcaccaatttaccgttggttgccaatagtgctatctgttcttcctcactcattgcaggtagcttctcgcttagtttcagctctttatatactaatccgctcgtgttgaagaatttcttcaccggcagaccgctgcgcggaatccatgcctttaattcttccaccgtaggattttcttctacgattaagcggttggtaaactcaatgttattttctgttaaccatttcttggctttttggcatgtgctgcatgccgggtactgcaaaaataatgttgccatattcatttataatttaatacttgatatttaatacttaatacttgaacttcacttcaatatctgtaaatcctgaaacataatccggtaagcggccgctttcttttccaatgctaatggatacgcccttgatgatgagggcatccggtaaagccgcatggcacgtccttcgaaaacaaattcggagtaatcacctactttgggttcttctatgtcgaattgctgtcggagagtgtccgttgctttttggcccgtagtgacgattgctttgcattcgggaagctgccgcagtaatgctgcaacatcggtggcttccactacttcaagaaacttgtccgatgcattatcctgcaaccggcgaatggatgaagcggtatcaaatagggcaatccccttttcgtttaaaaagtctatgatttgctcgcggcagaacgattttagtgtcgaattcagaaagtgattcttatcattaaagaataagattccatatatacgccacatgtcgttgtttaggttcgggtagtaaaactccatagaccaacgttttttctgtggcggaaaacttcccagcataagtaattttgatttcgctgggagaaacggttctaacggatgtatttcgatttccataatttctttcattttaatttcgtacaaaaatagtgataatgtttatttccctcaaaatcaatgagaaaaaatgctagatttaaaataattagttatttttgcggcgtgatgaacaaacaatattttattatatcattgaaaaaagaaatttttgtgacttgcttcttgataggcttacttttcctggagggaggaaattgttatgcttcggagcaacaagcgttaagagggacgatagaagttccttctgatcataataccgtgagagggcgtgtaattgatatctatggtgaaccactgatcggtgctacaatacgcgaaagggggggagccagtggtactgtgaccgatattgatggaaaattctttttgtctgtgccggatagtgctgtcttacaggtttcttttgtgggttataagactgtagaagtcaatgtggcaggtcggaatgtgcttgaaatacgtcttcaggaagatgcggtgatgcttgaacatgtcatcgtaacggccttgggacttgaaaaggatgaagctacattggcctattctgtgcaaaaaatcaagggagaagaactgaaccgtgtcaaagaagtaaatatgattgctgccctggcaggaaaagctgccggtgtgcaaatcaacaaaaactcttccggtatgggtggttccgcaaaagttagtctccggggaatccgttctgtatccggtgataatcaaccgctttatgtaatagatggagtgccgatgtcgaacacctcttccgaacaggcttattcggctattggtggtacggcgaatgcagggaatcgtgatggaggagacggaatctctaatctgaatccggaagatgtagaaagcatcagtattttgaaaggtgctcctgctgccgctttatatggtagcatggctgctaacggagtgattcttattacgactaaaaaaggcaactctgtcggacaaaggaatattaatttctctacaggactcactttcgagaaagcattcagtatgcctaaaatgcagaatcgttatggtgtcagtgatgtggtagacagttggggagagaaagagaatctgatggcttatgataatctggatgattttttccgtaccggattgacatcgatgacttccgtatctatcagttatggaaacgaaaacctgcaaacttatttctcctatgccaatactaccggaaaggggattatcgacaagaataaactgagaaagcataatataaacttgcgcgagacggctaccatgttcgacaaacgtctgaaactggacggtagtgtgaatgtcatgaaacagaccgttgagaataagccggtatcgggaggtttctatatgaatccattggtagggctctaccgtttccctcgtggagaggatttgtcttattataaagatcattttgaaacctatgacgaagaacggaaactgggtgtgcagaattggcatacgtttaccgaagacttcgaacagaatccatattggataacgaaccgcatacaaagtaaagaaacacgtacgcgcgttatcctttctctttcagcaaactttaaggtaaatgactggctgacgattcaagcccgtggaaacatggattactgggcggacaagttacgccagaaattctatgcgtctactgccaccgccctgtgtggagcgaacggacgatatatcgagatggattatcaggaaacccagatgtatggtgatgtcatggcgatggtgaagaaaacctggggggattttacactggatgcggcgattggtggtagtataaatgataaagtcgttaattctacccgatatgattcgaaaaatgcatctttgaagtttgctaatgtgtttaatattgccaatatcgtcatgaacagttctgccagtattgaccagcgaatagatcaacgccgtcagttgcaatctatattcggtacggcacagatcggttataaggaaaaattgtttcttgatttgacggcccgtaatgactgggcgtcaaccttgtcatataccaaacatgaaaaatccggattcgcttatccttctgtagggctttccatgctgcttgataaatgggtgaagttgcccgaatgggtttctttcgcaaaattgcgtggcgcttatagtaaagtagggaatgatattcctccatttatcactaatccctcttcgcagatcaatgccggtggcgagatacaggcgaatgacgccgcacctttcaaggaaatggagccggaaatgactcatgccatcgaatttggaactgaatggcgattctttcaacaccgtttaggggttaatctgacttattatcgtaccaatacttataatcagttcttcaaacttcccgcacttgcaggcgataagtatgcttaccgatatgtaaatgccggaaatatccagaatcggggatgggaattgacactgaatggaactcccgtattaactcctgatttcaactggaaaacttctgtaaacttctctaccaataagaataagatagtgaagttgcacgaagatctgaaagaaatgatttacgggcctaccagtttttcttccagctatgccatgaaacttattaaaggcggttctatcggtgatatatatggtaaggcttttgtgcgtgatgatgcaggcaatatcgtttacgaaacagagggtgataataaaggacttccattggtggagggcgatgggaatacggtgaaagtaggaaatgccaaccctgtctttatgatgggatgggatcatacattctcttacaaaggcttcaccctttattttctgcttgattggcgctacggaggtgaagtcctttcgcagacacaggcggaaatggatctttatggagtatctgaaataacggccgatgcgcgtgacaggggatatgtaatgctcgacggtcagcgtatagacaatgtgaaaggattctataaaatagtaggcgggcgtgccggggtgacggaatattatatgtatgatgctacgaatttacggttgcgtgaagtatcattgagctataatttctccaagaagtggatacagaaaacgaaggtactgaaagatgttcagctttcgtttgtagctcgcaatctatgtttcttgtataagaaagctccttttgatccggatctggtactttctaccggaaatgataatcaaggaattgaagtgttcggaatgcctacgacccgtagtctgggctttactctgaaatgtgaattttaaaggcaggagagagaaatgaagagaaaatatgtatatctatatttgttggggttattgctgttctctgtagcttgtaccggtaatttccgtgattacaataccgatttgtccggtatcacggatgatgacttgattattgatgacaatggctatggaatccgtttgggaattattcagcaaggtatttattttaattacgactacggaaaaggaaagaactggcctttccagctgatacagaatctgaacgcggacatgttcagtgggtatatgcatgacggcaaacctctgaacgggggctcgcataattccgattataatatgcaggacggctggaatagcgccatgtggacacacatgtattcttatattttcccacagatatatcagtcggagaatgctacccgaaatacacatcctgctctgttcgggataacgaaaatattaaaggtggaagcgatgcatcgtgtgacggattattatggtcctatcatttataagaattttgctaatgccgaaaaacattaccgtccggataaacaagaggatgtctattatgagtttttcaatgaactcgattctgctgtagttgctctcaccaactatatagatgagaaaccggaatccaatggatttgcacgttttgatattttgttggatgggaaatacgcttcctgggtgaagtttgccaattcgttgcgtttgcggttggcaatgcgtattgcctctgttgctcccgataaggcttgtgctgaaatacagaaaataaaagaaaacgattatggcttctttgaagcggaaacaggcggagcaatcgtttctaccaaatctggatataccaatccattgggagaacttaaccgtgtgtggaatgaaacttacatgagtgctaacatggaatcaatcttggtcggatatgatgatcctcgtcttggagcttatttcgaacactgtacggatgaagctttgaaaggacaatatcgtggaattcgtcaagggacatgttttgctcatagtcattattccggattgtcgaagctgtttgtcctgcaaagcaccgatgcgcctctgatgactgcctcggaagtctggtttctgcgtgccgaagccgctttgcgcgggtggaccgatgaagatgaagaagcttgttaccggaacggtgtaactacctcttttcatcaatggggaatttatggggtggaggattacctgaaaagtgagttgacagcttccgactttatagacacttatgatgaagaaaataatatagaagcgcgttgtaaagtcactcccaaatggaatccgcaggatgataaggagaccaaactggagaagattatcacgcagaagtggattgccatgttcccggaaggttgcgaagcttgggccgaacaaagacgaacgggatatccccgtttatttcccgttcgattcaatcatagtaggagcggatgcatcgacacggagatcatggtgcgccgtcttaatttcccaggtacattgcagacagaagacccggagcaatattctgctcttgtcaaggctttaggcggagatgaccatggaggtacaagactctggtgggatacgggaaataataacctggaataaaaaaaacagaagtaatgtgtttatatgtgtagctttaactatttttgcatcttcatttaaacacatttacttatgaaacaaattatctctgctcttttcctctgtatgttgctctctggcataccgggattgcaggcgcaaaacattcagctacattatgatttcggacgttctttgtatgataaagatttgcaaggtcgcccgctgttcacctccactgtggagaagtttcatcctgatacttggggaagcacttatttctttgttgatatggattacacctcagagggtgtcgcttccgcttattgggaaatagcacgtgagataaaattctggaaaggtcctttctctgcacatcttgaatataacggtggattatcgaaaggcatgtcttataaaaatgcttatctggcaggagctacctacacttttaataatgcttccttttccaaaggcttcacgctgactgctatgtataagtatattcagaaacaccaatcgcccaacaacttccagctgacaggtacgtggtacgtaaatttctgccgcaatctgctcactttctccggctttgccgattggtggcgtgaagaaaccaactacggaaagactatcttcctctccgaaccacaattctgggtgaacctgaacaaaatcaaaggcgtaaataaaaatttcaatcttagtattggctccgaagtcgaattgagtaataacttcggcggtcgtgatggcttttatgttatcccgacactcgctctgaaatggacgctgaactaaaaaacggattataagaaatagaattaaaaaaagtcggactaaaagaagccggacttcagaataatctctgtttatccctctgcggaacttaaaaaaatatatagaaaccctgttaaatgaaaactgatttaatctacggcgtagaagaccgtcccccttttaaagacgccttgtttgcggctttacaacatcttttggctattttcgtagcgatcattacacctccgcttatcatcgcaagtgccttgaaacttgatgtagaaaagacaagctttctggtttccatgtctctttttgcttcgggagtatctacctttatacaatgccgccgctttggtgtgataggagcaagactgctctgcatccagggaaccagtttttcttttatcggccctatcattgccacagggatggtaggcggattaccgttaattttcggttcctgtatggctgctgcgcctatcgaaatgattgtcagccgcacattcaaatatctgcgtaatattatcactccgctggtttccggtattgtcgtgctgcttatcggattgagtctgataaaggtaggtatcgtatcttgcggaggcggatatgcagctatggataatggtacgtttgctacgtgggaaaacctgtctattgcagcactggtacttcttagcgtcttgtttttcaaccgttgcgggaacaaatacctgcgtatgagttccattgtactcggactttgccttggctatggtttggcatttgctctgggaaaagtggatatgagtgcgttgaatgtggaaatgctgatgagttttaatattccccagccttttaaatatggtgttgatttcaatgtgtcttcttttatagccattggtctggtttacttgataactgccattgaagcaacaggtgatgtaactgccaactctatgatttccggacttcccattgaaggagattcctatttgaaacgggtttccggtggagtaatggcagatggattcaactcctttctcgccggtgtattcaactcttttccaaactccatctttgcacaaaacaacggtattatccaactgaccggagtagccagccgttatgttggttattatatcgcagcaatgctcgtccttttgggtttatttcccatcgtaggtgccgtattttccttaatgcccgatcctgtactgggcggtgcaaccttactaatgttcggcacagtagcagcggcgggaatccgtattgtctcctcacaagaaataggccgtaaagaaactttggtattagcagtcagcctctccttaggcttaggggtagaactaatgccggacgtattacaacaagccccggaagcaattcgaagtatcttctcttcagggattaccaccggaggcctaactgcaattattgcaaatatagtaatacgggtaaaagagtaggaaacaagtagtagaaacaagtattaagtaataagtattaccgaagccgctggtttatacttgataggcgttgattaatacttgttagttgatgcttgtcgattaatacttaatacctaattcttaatacttaaattactcattttatctgttgtgcggaaggggaaatcaggatactcgtaaagactgaaacgaggttcggtttctcctttcgtataattccatatagaagcatagtcttccggatcttctcccatcttggctaactggcgcaggtaagcagctagcgatttattctctacaatataaatctgccccatctgatcgataatcgggctatgatgacgagtaccgtcatgttcgaagcgtagaattcgttttccttcttcagttagtcccaccaactggaaagtcatgcttttaccgatagccggtaaattcaatacgctgcgatcagtggcaaggaaaggtaaatgatgctttctcatgaagcgtcttaattgcttggcaacatcctctttaggctcctcttctgttcctactttcgtctctaatatcttatataactcctctgcctgttccggtgtcatacggccataaatcttttcctcctgttgctcctgcattgaacgactgttgggtgcaaatactgcataattctcattgaatccctttaccgagaaagtgtaataacataccacccccaacgaattgagcacctgacgaagccgggtcgtatgccctctacgtgaagcagccaccgtatataccaactgattcgtaataatccatcccgcagaaagaatcttccggatcgcttctttagcttcaggagtaacctccagcggtgtctggaaatgagtctgtataataaactgtttcacaccgatagccgatgctttctccttgaattcccgcagaacatcaaccagcccgtcgttgatacgcatcggcaaataagccaacagacgtgaccccaaccgtacccgttgcaattccgcatatttctctccatccttgcgttcaagattcgccctttgtttgcgtgccgccatccgatacaccgcatccagaatattctgaagcgttttattttgactcatcagcgcatcgcctcctgtaataagaatatcccgcaattgcgtatcctcttcaaaataagccattaaccgacgcaacttacgatcccatgattccttcgggcgtaaagactcaaattcgaaattcaaccgctcgctctgaaaatcatacatacgctgacaggaagcacaaagtcctccgcaagcccgtcccatagtgtcaggaatgagaatagccacctccggataccgccgatgaatgttatgcccgtccggcaaaagccatcccgcagcattaggcttcccggcttctacaatatcctctttctcccacgcgcgaatatttccatacgtctccaccaaacgtggagaatacagaatataactccgaatagcctcgtcattatacccatatcccgttacattaagcaacgataaataataaggagttgcaaagaacggcatacccttcttccgggcacgataaagcaaatacatagtctctgacgaaagtgaatttcccaggaatcgattcaactcgcccggacttttcacagccattgccaaatgaaagcggaaatcgttccaccactcattgaccaacctgtatttttcttcataactcattccctcctcaaagtgaaaacgcaccgaaggcttcgacttcctgttttcaatcttctgaatcaacaagtgcaacatccgctccttattctcatcccgcacttcacgtacctcttcatccaatcccgtttcccaccggtcattcctgcttttgatacgctgtggcgatggtaaaggcacaacctctcccttcaaccgtttaaacatctggaaaatttcaataaacaaatccgtcggtatctccatattttccaacgttcccgtcagaaactcataaagcaaccgaatcgtctgtactgacatatcctgtccagtagacagttcatggacattctgtccatcataatcgagtaagagtcgaatttgctccctcgcctcctccgcagcctcattttctatcctgcaaatttccaaaaaacgcagcatcccagccttgaactcttccacagaagagctcttatcagctatctccaccgcttcaggaatttcttgattatagatttgtttcaactgtgaaaaagtaagcgcaagcattttcttttgtttcataagcaatctctctattttttaattattataatatactaccacaccgcatagtccccctccggcctcgtctgcacggcgtcaagcgaaggttttattaccggcgttaagaagggcagactgtttgagcgaagcgagtttctaccctttagacgggaatgaaaccggagtagccgggcaggcgcagccttgattttttcttttgggtactttttcttttgtatcaagacaaaagaaaaaagtacataaagataacaaaaaaagcggaggtacaaaacccccgctttttctatcctattaatctttacgattttctaacatttaaagcgacttattttttcgtttccgtgtcgtcattcttccgtttcggctccttcttggcaagaagaacaatattatacacataatccgtcatccactgttcagagtatcccaaacgctctttgtactggcgaacagtcgcagccgttttatgcacatcatcagccttccacactgtcttggtacaaacatcgtgtaccgttttctgtgtcataccatacaaagccttcttaaagatcgacggcatacgaaacctccactgcatcagatttcccatcaacatcatcagatcattggaaaatccctgatacatgaacaaataagattgaatatcattttgagtgcggcagttacgtttcacggaagagtcgatttccttaaagaagttctcgttcaacccataatcctgcatcagcattttgcgcgcagcagatttttcggccaatcccagtttaccgttttgagtaggaactttaaacaaacgtttgaagttagctacgtccggcaagaagcggatattagtgataccgaggtttgtggcgataactgactggaaatacacccgtgtcagtgatatgaaatcttctacattgccgactttcgtttcatcggattttttcttgaataaaccaaataagcccattgttatctctacaattttattatttacaatttactatttgagcgtgtggaaggtatataaaataactaccatctgtcaatttgcgtgcaaaggtacaaaaacagttggttttcaccaacattccaagtccttttcgatgtccggcattgtctctttcttaaaaacagggctttggatgccagctttcttttgcgcccggtaatcatttagcagacggatagcatattttccgaggaaaaggatagcaatcagattacagatagccattaacgccatcgtgacatctgccaggctccataccatatccaatgtggcaagtgaaccgaagagcaccataccacccaccaatatcctgtaaccatgaagtacccatttccggtgagtgataaaacggatattagcctcaccataataataattccccagaatactgctgaaagcaaaaaagaaaagagctacggcaacgaagatactgcccgaagaacctatttcgtttgtcaacgcctgttgagtcagctgcactccattagccgaaccatccagaggagccccactaaagaggatgataaaagccgtacaggtacatatcaataatgtatctgtaaataccgccaaagtctgtatcaacccttgttttacgggatggctgacatgagccgtggcagccgcattcggggccgaacccataccggcctcattgctgaaaagtcctctcttgatgccctgcattaatgccataccaactcctcctgccaatgcctgctcccaaccgaaagcatggctgacaatcagtgcgataacacccggtaaatgagtgatattgagtgcaacaataaccagtgccagccctacatatcccaaagccataacaggcacgataatactactgacgcgggcaatgcgttgaatacctccaaagatgataagcaatgtcagcaaagtcagcacacctcccaatataatatgattgaacccaaaagcatgctctgccgcagcacagatcgtattactctgtacagaattgaaagcaaacccgaaagtaatgcttattaatacggcaaaaagcattcccatccacggttgtttcaaccctttcttcatataataagcaggtcctccgatgaacgaatcctttccgcgtattttgtataattgtcccaaagtagactctatgaaagcactcgaagcccctaacagtgcgatgacccacatccagaaaatagccccgggacctccgatggcaatggcagtagccactcccgcaagattccccgtacccacacggctggcgatagaaatagcgaatgcctgaaaagaagatacatgtttctctccctgttttcctttgccggcggattcgcttaacagcacgatcatttcccggatcatgcgaaattgtacaaagcgtgtccgtaggctgaaccagacagcacatcctaataacataataattagaatatacgtccaaagtatgtcattaatctcgttgataaaagtcatagttaagtattaagtataaagcattgtttgtggttattcgtcttttattcggaagtaaaatttatgattttcgaatacaggttccacaatatcataacgaacaaatttggcgagcagatgttcagcggcacgtcgtgaaagtccggtttgtcgacagtaacggttgagtgagagtaaagttccgtgctccagttgatcgagcaggagctgttcacgttcggtgtagcggatgagttctccacgggggctatcgctctgttgccatacacggagatgtatgggagttgccagaatattttcgtccttgatgcggagataggctaggggctttccggtttcgtccttggcgtaaaccggtttatgtggagtttcttcgatggttgccactaacacttgtcgtccttccactatgtatgtttgcagagaatattccacttccggcacgcaataaagttgtgcggtggcttcaatcatatatttttcttcttcggagcgtactcctgcgattttaccattgtctttaacgccaataagtaatcgtcctccgttcgtgttggcaaaagccgaaagtgttttggctattttgcgtgcgtcggaaatttcgaatttaaagtcctgttgctggtgctctccttcagcaatcagtgcatgtatataatcggtatctgtaagcagtttcatggctacaaaggtaggtaaaaaaggtaaaaagccccttttttagatatttttcgaagattatctcaaaaaaaatattgattttatgcttttatttcgggaaacagtgtatttttgcggcacattattaacgaaaaaaataaaaggattatgaaagaattggtagaaaaggtagcagctctttatgctgacttctcaaaagatgctaacgcacagatcgaaaacggtaacaaagcagcaggaactcgcgctcgtaaagcttctttggaaatcgaaaaagcaatgaaagaattccgtaaagcatctttggaagcttctaaaaaataatttagaagactactaggatattgaaaaagagggcatatcgtgaagcgatatgccctctttttgttttaatgcggaatgactttttattgttttagtacggatagtggcaattatttatagcataaaaagcggttcgtttgggtgaatcgcttttttagaaaacctcaaatccgcaactaagcccttgaacgtccttattgcgtttacacgtcctctcattactgaatttgcagataatttgaacttgaagcacccacttctgcctacaatatccccttaccccacaatgtgacttgaggcaatacacaatatcattcccataagttgtaggcattatccaaaatcagtctggaaaacatctgcgtaagcattattacaggtatagatgttcagcacataccgccttgatgtcctgatccacttggctggtacagagataaacctgaagacaaacgcttttatgcgacttgttgcattgagcccgaacttctttacgtcaagtctttgaataatggccttgtaaaagttacggataagtgctgtaagaagaaggaacactgtgttctctgccatgaaggatttgggcaatctgtcccacccgaaaccattgttcatatcatcgaagatacgttcctttcctccacgaaggttatagaactcgacaatttctcttacggaagaatcatagtcgttagtcaggatacaacggtatgtgtattctccttcccaaaaatcctgcacaccatccatccgtttctgtctttgaatcacaagtcgatatgccttacctttccacttctcaacaaggatagagttcaattcaaactcaatgccattgatttcctcagttttccagcctttgagagcaaaggtgtcattgtagatcgaactgcagcggttagcacggatatagaaggacttgcagtgtttttctatttcctccacgatttcctcggaacatgatccacaatcagctctgaagcgattgatagtgagcccattctgttcaaatctcgcaaagaacctcttcagcgtgtccttctgatggaaacgaacatttgtgttaccatcgctattctctataccgactatcaaatcgccaataaccgccacgccagggcgataaccaaggaacttcttgtatgtaggctttgcatcatacttctctgtctctatgaactgatggtcgaaatcaacatcatacatctcaccctctttcagttggccagatgcaaatatacaattgagcaataaagtattgagagtgtcagccgtattgaaatcgtaggtcttgcccatatctgatgtgtatgaaatgttttcttgcgtcaactcctttatcgccctgaggatagtatcagagctacaagtgcgaagtgtcggatgaagcgagaggtggttcatcaaatgagtagtgacatcctcaatacatgaaccgctacagaagtagatactcatgagagaacggatgatttcgctgtactgataaccgaacgatctacaccttagaccgagggttgagtcgattacagatgataatgtggagtcaaattgctccatgattgaaaataatcccccaaaaggagtgagtctctcagatttaatttgtatcttcgccatgtctatcgtcggattctcttgttttttttgcaacactaagataagtgaaaattctgacatggcaaaatcctgagcaactttttgttgctcaggtacttaaaaagtttaatttataatagtgttgcggaattaagggaaaagagatgtctcccaagatgtaagtccgggctttttatatttttgtggttcttttaaatgatttatttgcaatttgtaggggggcaaacttttttcttctatacgcatctcaaatttaatcgtatatttgcgaaaagaatcaagatcgggaatgatgaacgaaaacgtcttagctaaactgaagatacttgcagaatctgccaagtacgatgtttcctgttcttccagtggtacggtgcgttccaataagccgggaacgctgggaaacactgtgggaggatgggggatatgccacagttttgccgaggacggtcgatgtatctcgctattgaaaatcatgcttaccaattattgcatttacgattgtgcctattgcgtcaaccgtcgtagcaacgatcttccccgcgctaccttttccgtttcggaattggtggagctgacgatggaattctaccgtcgtaactatatcgaagggctgtttcttagctccggagtggtccgtaatccggactatacaatggagagacttgtgcgtgtagccaaagatttgcggcaagtgtaccgttttaacggttatatccatctcaagagtattcccggagccagtcgcgaattagtgaatgaagccggattgtatgccgatcgtcttagcgtcaacgtcgaaattcccaaagaagaaaatttgaaactgcttgcaccggaaaaagaccataaaagtgtatttgctccgatgaaatacattcaacaaggcgtgttggagagtaaagaagaacggcagaagtttcgccacgcaccgcgtttcgcacctgcgggacaaagtacccaggtgattgtgggagctacctccgaatcggataaagatattctttttctttcatcggcactttatgggcgccccaccatgaaacgtgtctattactcgggctacgtttccgtgaatacgtatgataagcgccttccggcattgaaacagccgcctctggtacgtgaaaaccggctctatcaggctgactggttattgcgtttttatcaattcaaggtagatgaaattgtggatgattcctatccggatctcgatctcgaaatagacccgaaactttcgtgggctttgcgccatcccgaacagtttcctgtcgacatcaataaggcagactacgaaatgttgctccgtgtgccgggagtaggggtgaagtcggcgaaactgattgttgcttcccgtcgtttttcgcggctgggattttatgaactgaagaagataggagtggtgatgaagaaagcgcaatatttcatcacttgcaaagaactgcctctccagatgcagacactgaacgaactttctccgcaacgggtgcgcagcttattgttgccgaaaccgaaaaagaaagtggatgaacgtcagctgttgcttgattttggcgaatagtaaatatgcttggtgttttttatgaatgtttatatttacgataaaacctttgatgggctgctgacggctgtgttcgacgcctatttccgcaagacttttcccgatgctttgttgtcggaaggagatgctttgcctttattttgtgatgagctgcatacggtagtgaccgatgaagaaaaggccgggcgtgtgtggcggggattgcagaagaaagtttcctcttctgctttgggttgcctcacgcaaagttggctgtcggaacttccggaaataggaatacttatttttcgatatatccgtaaagcaatcgatgccccccgctctattgaaaccaattttggtgatccggacgttttgcaattagcgcaaatatggaagaaggtggatggcgaacgcgtacacctgatgcaatttgtccgtttccagaaagctgccgacggtacattctttgccgctttcgaaccacagtataatgcactcccgctgaccgttcaccatttcaaagaccgttttgccgatcagaagtggattatttacgacatgaaacgccgttacggattttattatgatttgcagaaggtgacgactatctcgtttgatgatgacagtcgtgaatcccatttgattacggggatgctggacgaaagcctgatggacaaggatgagaagcttttccaacaactttggaagacatatttcaaggctatttgtatcaaagaacgcatgaatccgagaaagcacaggcaggatatgcctgtacgttattggaagtatttgacggagaagcaaaagtgaaaatcaccataaggcaactttccctaaattgtctatttctaatttggcacttatacccatcgctttaaagactttagctagcgtggaaagagttaagtttttcccgctttctatgcgggagatttgggctctttgtacgcctatcagatttcctagttcttcttgagtgagatttttggattgtctggctttttttatggcttctccaataaggaaagattgtaagccctcttcaaatttatcacgtgcaagagttcccttctttcctatatgtttatctataatttcttcttctgtataaaacttcatcttttccatattcttattttttagaattaaaatatatttttcttatctcttccgcttttgttatttctttggaaggagtcttctgggttttctttataaatccatgggtagcaatgactaaagtatctactccatccactttatcccaaaaagctaatagtctatattggtttttgttatagagtgtcctgaactcccatatatctgtattgtctaattttttaaagagttccggggctataacaaatttagactttgctatgttgtagataattttgtcttttacttttggggggcaattggttaagaaaattgtccgcttcttctgaatatactattttaaatttcgcttttgcctccatggatttattttttacgtagcaaaggtactgaaaatagttctatatatggaaacattcgagatgttttttttaaaggggttatatgtacttttctcttattcaatcctttgcaccgttacatccggaaattcctgtatcagcgaaagcagatgcccttcatcattatttcgcttcgacttgataaccatcgtaacctgataatattctgtttcacccgtgtgttgcgtttccatctcgtaagagactatcaggtagtctttagagttgaatctgtccgctatctgtttcagtatgtctttgttgggagttgagaaagaaaccatcgagcttttcattccgatgcttttaaatagatagctaagtagttccagtccgacgagggttaacaccgtggcggcaataccgatggtgtacattcctgcacctaccgccaagccgatacctgctgttgcccagattcctgcggcggtagtcagtccgcgtacaatctgtttttgaaagatgatggttcctgcaccgataaatccgataccgctgacaacctgtgccgccacccgactgggatcgagtgtgacactactttcttttataatttcctgaaatccgtattgggaaacaatcataatcaaagcactacctagcgacacgagaaaatgagtgcggtatccggcttctttggcacggtattcacgatccagtccgatgatggttcccaatattccggcgaccaataaacggattacaaaatccatattcaacatcatgtgttcaatctcctttctgttttttattgtttgtggaaaaatgcttaggaccataaatatacaattatttcccctttttgtatcaatcatttagtaatatttgaacgtatccaattcattttatcgtatattcgcagattcaaataaatgtttaatcccgcgaccgagcaaataatgaagaaaagaattttttatataatcagctttctggtgatcttctgtatggaggtgttgatagctttgtatgtgcgcgaccgtttcatacgtccctatgtcggagatatgctggttgtagtgctggtatatagctttgtacgtatctttctaccgatggggattccgcggatgccgttttatgtctttctttttgcctgtttcgtagaagtgttgcaatacttccagctggtggaaacattgggcattacgaaccgcgtagcccgaattgtgctgggttctacgttcgattggggagatatcgcctgctatgctgtgggatgcgttttcattgtcttattcgagcgtatttgcaaacactcataacagtgaggcgcacattttacgtatttcgttgagtcggtttgaaagggctttcttttcacgggccaaagccatgttatatcgtgattgcatattgataagtaactctggattaatgtctagagctgcttccaccatcaatgcaaaatcactggtaataggtctttttccattcaatatttcattaagcattgtataaggaaccccaagaatttccgagaatttcttttgagagattttgcggcattccaattcttcttttaacacatcacctgggtgtgtaggtaatctttttattgtattcatacttgattttttattggtaatgattggttatgtcagttactatacaaatggttaatatagtttcagtaccttcggtgcgggttctaaactccagccggtagtgatagtctatacggatggaaaaatagtctgcacggccttgaagagcttcgaagtttagagaattaaagacgaataaatcttctatccgcgtagcggcaattaaagtatcgatacgtttctggtactttttgataacagctgcgtcaaaacgatattttttgcttttacacttaccatcctcatacaactccttagatactctttttcgtactctataatcatattccatttgtttctgcaaatatagtgttttatttataattcacgaaaatagtgaatgtctttttctttgcagaaaagggaatagagcttattcagtcactatttaacggatggccgcaatatttgcaaaactctgcattatcttcgtgtccggagcgatggcagttgggacattctttgtctctcctgcgtttatactctttcatcatggaggcagatacgatacctgtgggtacggcaataatcgtgtaaccgatcagcatgacacaggcggaaaggaattttccgaggccggtggcgggagtaatatctccataacctacggtagtcatggtgacgatagcccaatagatgctgttcgggatattgttgaactgggagttgggttgcgttccttcaatcatatacattagcgttccgatggaagtcaccagaatgacgacaaacaggaagaacactgcaatcttcttactactttcacgcaaggcggtgagcagccgttccccctcattcagaaagttgaaaagcttgaagacgcggaacacacgtatcaggcggaaggcacggatgatgagtagatagcgggcgcccggaaagagcagaccgatgtaaagaggcaatgtggccagtaagtctacgataccgaaaaagctgaatatgtatttccggggacggggtgaacagtagattctcgtcaggtattcgaaagtaaagaagccggtgaaaaggaattccataatgacgaacggagtcgtcagataggtgggaagtcctttcaggctttcgatgatgacgagcaatacgctgaccagaatacaggcgataagaatcacgtcgaacaatttcccggcaggggtgtccgattcgaagatgatgacgtataactttcgtttcagtttctcgtcatgcaaaaaacgatggattctttctttcagtttcatatcaatagtgcttggccggaattaaagaaaaagtctttttagtcgatgacccactgtttattgtaggcaacggtcttttgcgggttgtaatacattccctcttgtgtaggaatatagagaatgtatgtctttccggtcttgttcttcaatgaagtgtcgcgcagccaggggttggcatcacgaagttgggcataggtgattccctgtgattttgcgtagtcgttcagatcgtcgatagaagtgttgacggttacctctttataaggaataggcggatacagatgttcctgtttcaagaggaatccgtaacgttgcgggttattgaatatctctttggctgccagcaggcggaacatgtagcgggaagtttcctctaccagccataagtccatggcatgacttgccaactgcttttcaagttgggaggagatacgtccctgtccggcgttataggcggcggagacagccatccaatcgccatatttggcatacgcttgtttgaagtatttgcaggcggcaacggttgctttttcaatatgatagcgttcgtctacgttatcgttcacttccagcccgaattcccgtccggtggcaggcataaattgccatagacctgctgctcctgccggagagcgtgcgatgttattcagattgctctcgatgaccatcaggtatttgaagtcatcaggaataccgtttgctttcagtatcggttcgatgatggggaagtaacggttggcacgcttgattaataacatggtggtggagtgcatataggtgaaggccatcatctcgcggtccatccgttcgcggcggtcatagcgccggaggtcgatcgtttccccgtcgaaggtgacctgtgcgggaacagtaggcggagtgacacaataaggcacttccgatttggcggaatgttgttcgttcacttggctgctgcctgtcaatattgggatggaagcaccgatgcaaaatactaatataagtgtaagaatatagttgattttcatttgtcttttcattttataacctttttggatgcttcaatgtttacgtctatcttgcaaagataacctcattttgcttttttcaaagaacttttcttgcattttatacgtttttctaatagagttaaaataaacaacgaatcaagatgaatatagcaatgaccggagctaccggatatataggtaaacatctttctaattatcttacagaaaagggcggacatcggatcattcctctaggaaggtcgatgtttcgcgaaggtatgtccggttatttgattcagacactgacccattgtgatgttgtcatcaacctggcaggtgcacctatcaataaacgttggacaccggaatataaacaggagcttttcaacagtcgtattgttgtaaccaatcgtattatccgcgctttgaacgcagtcaaaacgaaaccgaaactgatgatttcggcttctgccgtaggttattatccttcggaagcggaggtggacgaatatacccgtacccgtggagaaggttttctgtccgatctttgctatgcgtgggaaaaagaggcgaaacactgtcccgaacctacaaggctcgttattacacgcttcggcgtagtgctttctccggacgggggagcgatgcagcagatgcttcgccctttgcaagccaccaagatagccaccgccatcggtcccggtacacaggtttttccgtggatatcgatacgggatctttgccgtgcaatggagttctttatcactcacgaagagacacatggggtatataacctggttgctccgcagcagatctcgcaatatgctttcacccgtgcgatgggaaaggcttatcgggcatggacaacgatggtagctccgcaacgaattttccgtatcttatatggtgaagcggcatctttcctgactgctggccagagagttcgctcaacgcgtctgacggaggcgggatttcatttctccattcccaatgtcggacgtcttttcagaggcacggaccatagtacggttacctctctcgatttgcaccggtatatgggactttggtatgaaatagcccgctacgagaatcgttttgaatacggacttgtagacgtcacggctacttacacgctccgtcccgacggcatgattcgtgtggagaaccggggatgcaaacgtaattctccttacgacatctgcaagactgccaacggacacgccaaaatacccgatcccacacagccgggcaaactgaaagtgtctttcttccttagtttctattctgattattatgtcttggaactggatgaagagaattacaattatgccctggtaggcagcagtactgataaatatctctggatactaagccgtacaccccaactgccggaagaaatcaagaagaaactcgtcaccgctgccgaacgtcgtggatacgatacgagccagttgaagtggatcgagcaactctgatcgcaggcatatacatatatcagtttatgcaatccgcacctaataaataatataagattgtttagcgaaagtatttaacggacgataaaccaactttaaaacaacagaaattatggattacgaaattattcatcagcccgaacaaaaattgttcaagacagaagtagacggtcgcaccgcctttgtacaatatcgcctgataggtgattctcttgatattatccacacaattgtgccacaacccattgaagggcgggggattgccgctgctttggtaaaagctgcttacgcctatgcattagctaacgggatgaagccgaaagcaacgtgctcttatgcagtgaagtggttggaaagacacccggaaataaatggttaaatactcgcttttgattcgtcggaaaaggaaataatattatctttgtaattggaaatcaatgaagaaaaatagtgttatgataaaagaaggtgaaaaggtaaaagtggatcctagattaacgggactcgatgaatggatagagggtacagtaattgatattgaacataatccgttcaaaggcttagttatagcgattcgtgataaatttaaccgtattttctttggtgagcagaaatattttattcctgtaaatgaggataatgtatgtatgcaatagcctttgatatggtcattacagacctacgtgccaattatggagagccttataacaatgcctattttgaaataaataaagtgttgcgtcagtatgagttttataatacgcagggtagtgtatatctaacagagaaaactgatatggcaaatctttttcgtgcaattgacgcattgaaacgtattccttggtttcaggcgtcagtttgtgatcttcgtgcgtttcgtgtagaagactggtcgaactttacggattttataaaagaaaataagtagataagctttcaggtctgaatatgtattcatgcctgaaagctccttttatttctcaattactgtttccacctcttcaactgtggaaagtactccttcatcgttttccgtgcttcctccactgtgtatttcacttccgagtctttattgaactcatccagataattcagattaagctcgatcatctcgtccatggtacactctttcgtgaaatgtccgtccgcatagcaatagtggcaataatcttcgttcttgctaccgtccgtttcttttccaaaagttgagtcgtctatcggcataccgcaactttgacaaaatttttgttccatctttttttgttagattataagtttatgttacaagacaaatgtaagtagaaatattggaaaagaagtaatccggtcttgctatttattcatttatttctttcctggtttgcttttggtgttaattggttttcacgggcagccgtttccacatccaacggggaatcattttccagaaaaagaccagtatccggtagcgccagtcgatcactactatccgttgtttccgctccagtgaccaggcgatgtgacgtcccactttcgctgcatccattaatagcggataatgtttcccgtcgttgagcaagtcggtggcaacaaatccgggacggatatcagtaaaacggatattcagtttttgtaaatatgaaagttgttcgagagcatctatgtaagtgttctggaagcgtttggtggcagagtaggcaggagccactccaagtcctttcgttcccgcgatggaactgatgactgccaggtggccgcctccgcttttcctgaaatagatgaaagcggtatccaccatgcggataaatccctctacattcgtgtatgctgtgttcagctccacctccatgttcagattcgtgttctggaaaccgatgcccgaactaagaagaaacaaatccatgccgcccaccttgtcgatgagcatattcaatttctcgcctgcatcttcctgggttacgtccaacgtttgaatttgaatctgatccggtgctgcccgttgcaggttttcgagagcagattgccgtctgccggctactccgatttgccatccatccagtaacagacattttgcaacttcttgtccgatgccggaggtagcgccaatgataatggcttttttcattactgatttttttagtaagttataggttcaataaatgtcgtatggcctgccagggtgcataaagcaacatcctcggtccggagaaacgcatcacctgtcgcattcgttcgcgcatgacgggtttgtaacaatgtacggtgcattccttgcatgcactcttcttctctccaaacggacaatggtcgagacgtgcgtgggcatagcggagcaactcttcacagtcggcacaaagaattgtatttttttcttttttccggcaatagaggcggatcatcaactctaccgttttcttttcgtgcgcaatgcgtgatgctttcatctctttcttttttacactttggaatgacaaagatagcgaagattatgcagaaatgcaggcgtattctgttaaaatacaccttcttcttttttctattttgaaaagcaccctttcattttggtagggtatttagagattactttttcaaaatgaaaaaaatattgcattgattacaagctaattatcagaatccttttcattttggcatactcttggctatgaggggaacatacaaaatgattcatgagttatggaagagtacatttcagataacagtctgtatattcggagtaagaataatagcatgattaaccggaagatgatagggcgcgtgttgggtatgttgctatttatcgaattggggatgttcttactttgtgccggagtgtcggctggttacggggaaagtgattataaatactttctttacacctgtatcatcaatgctgtggtaggcggattgttactgctctacggacggggagcggagaataagatgagccggagagacggatattgtgtggtcactctttcatgggtgttttttacctttttcggcatgcttcctttttattttagcggaagcattgatacgataaccaatgcctttttcgaaaccatgtccgggtttaccactacaggagctactattctcgatgatattgaatccctttcccacggtatgcttttctggcgaagcctgacgcagtggatcggtggtttggggattgtgtttttcacgattgccattcttcctatctttaccacgggaggagtgcaactcttctctgctgaatctacgggagtgacgcacgaccgtacccatccgaaaatcaatgtcatggccaagtggttgtggacaatttatctggtattgacagtttcggaaactgtcttattgatgtttgggggcatgagcttgtttgatgccatttgccagtcgtttgccactactgctacgggcggatattctaccaagcagaacagtatatcttactggaattctccgtatatagaatatgtggtggctatctttatgattgtttccagtatcaacttctctttgtttctgatgtgtttgaaaggaaaagtcggtcgtttattcaaagatgaagagctgcactggtttctggcgtcagtgggtatcttgacttttcttatcacgttggcgctcgtctttcaaaatcattatgactgggaactggctttccggaaagcattgttccaagtgtctacggtgcatacttcctgcggttttgctacggatgattataatatgtggcctcctttcacgtggttactgttgttcattgcgatgctttcgggagggtgtacgggttctaccagtggaggtatcaagaatatgcggttgctgattgtggcgcgtgccatccggaatgagttcaaacatctgctccacccgaatgccgtgcttcccgtacgtatcaataagcagacggtgtcttcttctatcgtaactaccgtattgattttctttgctttttatctggttctgatcctgattgggtggacggctcttttgtttttgggagttggcttttccgagtccgtcagtacggttatttcgagtataggcaatgtcggtccgggattgggaacttgcgggcctgcatattcgtggaattctttacctgatctggcaaagtggatactttcttttctgatgctggtgggacgtctggaattgtttagtgtactcctgttgttttatccgggattctggaagaatagataaactgtaaatcatgaacgggcttctgaaacatcgttggaagagtttgtggttgacggaaacaatctgtatctttgcagcatgaaaaagttattgtgtccgcaatgcaagattgcagctatgtatgtgaagaatgaacagggtgacaggctgctggtttatgtgctcgaagatggtgaagttgttcccaaatatccggaagattcgatggaggggttcgatttgacagaagtcttctgcctgggatgctcgtggcatggttcacctaaacggttggtgaaacgatagaccgggagactcatgctctcatactgatttttttgatttatgtcaactaaaagaggaacgcaaatcaagaactaattcattgaattttccgtatctttgcatccgattttagaacatagacgtatggcaacttctaaagaaatgacggcagggccggcattacctctcattttaaagtttacgctgccgcttttactcggcaatctgttgcaacaaacgtattcgcttgttgatgctgcaattgtaggaaagtttttaggaattaacgcgttagcttctgttggagctagcacatcggtggtgtttcttattctcgggttctgcaatggatgttgcggaggtttcggaatacccgttgcgcagaagtttggggcgcgggattacagtacgatgcgcagttatgtggccgtcagtctgaaactggctgcgggaatgtctgtggtgattgctcttctcacctgtattttatgtgaggatattcttcggatcatgcgtacgccggagaatattttcgaaggggcgtatgcttatttgcttgtcacgtttattggtgtgccgtgtactttcttctataatcttctttcgagcattatccgtgcgttgggagacagtaagacgcctttttggtttctgctgtttgcggctgttctgaatatcattcttgatttgttctgtattttggtacttggctggggagtggcgggagctgctattgctactgtcttttcgcaaggattgtcggctgttctctgctacatttatatgtaccggaagtttgaaatattgcaaggtactccgaaagaacgccggttccagtcgaaactggctaagacactgctttacattggtgtgcctatgggattgcagttttctatcacggctatcggcagcatcatgcttcagagtgcgaataatgcattgggaacggcgtgtgtggcagcttttacgtctgctatgcgcatcaagatgttctttatctgcacgttcgagagtctgggaattgcgatggctacgtatagcggacagaattatggggcaggaaaaccggagcgtgtctggttgggaattaaggcgagtgctttgatgatgatcgtttatgcggcatttacgttcgttcttctgatggtgggagccaaatattttgcattgatctttgttgatccgtcggaaacggaaattctgttggataccgagttattcctgcatatctcctgtatgttcttcccgatgcttggattgttgtgtatcctgcgctacacgattcagggagtgggatataccaatcttgccatgttttcgggagtggcggagatgattgcgcgtatccttgtcagcatttacgctgtgcctgcattcggctttattgctgtctgctacggtgatccgatggcttggatagcggcagacttattcctcgtgccggcctttatctatgtttatcgcaggttgaagaagcaggtatttacgaatagtcaggttacgcaaacggtggcatgattgccggtttgtggcttgcgtaacccgacttgcagtttgcataacccggtttgtggcttgcgtaacctggtttgctttgattttatttcggatattttaatcttgtacagggtatagcgggtttccgctttcgtctacctctgtccattctttcacactgacattggcgaatgagatggagttttcattgataactgcccggaaaaggtatgaatttccggctgacaggaggttgttgggtggagtgagcggagtggtgtaggtacgtgaaaagctttctccgtttaccatcagctccagtgtcaaagtcatgggagaggagctctttacgggtaacatgatatattgtacggtgaagtcgttgattcccatatcggctgctttgtcatagctgacttccgaagtgatgatacctgttgacaaatccatgattgcgcccggtttcggtggggtgatggtagcggaaagtatcttgtttaaagtgatattttctcctccggcgatcgctacaactacttgcgtggctgcgtgttggtaggttatggggatatttatctgtgaactggcgatgtcctgatgaactgcgtgccaccaaagataatctactccgttggataaaggttcggatagtccgttggtgaaagtaggcgccgggctggtggaattgcatgatacggcataaaagctatagatagcattgctcaaatacattttatatcctagatttcctgtcagtacaccgggggaggaggtgacatagttgccttgagcaacgggagcgcctgtgatattgttcgatgtgttggctgtataggcacacaaccagctttgaagtccttttcccatgggggacatggctcgtgtgatgtttcgtccttctacggaagcactgaaagtaatcagcgcattctctttggccggattaccgttgttgtcatcattgccggagccggatgagcctccgttgttttcttcgtcaggatagttgatgtagatattgtttttggagcaggctcccagtagcagcattgctaaagcagatacggctaaatactttgtaatgcggaatttgatgtccatagtcaggttctttttgaaaattagtaattacccctatatacatttcaaaaagaatttggttcatggcttaatcatatttttttatggaaatcggcctctttctgtatgcagagaatgtctccgtatatgggatggcggaactctatatattcggcatggaggtatagtctgtctgctttctttccgtagagttcgtctccaagtatggggcatcccaagccttccggatgggcggcgtgtactcttaactgatgtgtgcgtccggtcaatggatagaagataatccgggtgtattttcttgactcattgatactccgttctgattcatcaatcctgtttgattcgttgaaagtgttttcagattcactggtaattctttcagactcactgatgatctgatattctgtaatcgcttctttcccgtgttcgctactaaccatttgccgaggacggtcgagaggattcagacaaagagggagttcgattcttcctgtatttcctgttctttctgcttttgctgtttttttcgttaatacagtttcctttgctattaatatagctttctctgctattggctttgtctctttctctttctctttctctttctctgtttttattatcgccccatccagcacagccacatagcgtttcttaatacttctgtttgcaaattgcgcctgtaaatcctgatgtacctcttttgttttggcaacgagcaataatcctgaagtagccatatcgagccgatgtacaatcatgggaccggtagcttcgggatattttttcttcaaacgatgatagactgaatctctgtcctccgcttttcccggaacggacaacatccctgccggtttattgactaccagcaaccattcatcttcaaacacgatttccagttcttcctcttcatgaacaggattcagcagtggattttcgtctacctccaatccttgcaacatgtgttgcagaatcggttcgcacttccctttgcaggaaggataataatatccgtgatgccggatttcgtttttaggagagtcgccccaccagaattcagccatagccaatggctttaattgatgaagatacgcatattgcaataacttaggcaaagcacattcacccgcaccggcaggaggaactttctgaaccgtttgctcgaaaatagtatataaatctttcacctctccttgggcatttagcatccggaattgctcgaataactttctttgtaaagctgctgaacgttcttttcgttcggttttcaatcgctctatttcaatatcgaagtgcctgacttccgtttcgagctcttccaatcgtttcttccattccttttccagtcgtttgtattccgctttttggtattggctttcccgaatcagggaggcttgttcttcttcggaaagctccggagatgactggcggcgaatctctctcgcctcctttgccattttaagctccgcttttgcttgattcaaaacagctttagcctgttccgtttctatcttccatttctcttttgaatcgagataagaactactgttttccagttcacgaatacggatattaatggcagaaatctgttcttcttcgattttgaagaatccctctggttgtaataggtcataaacaggaggaacgaaataaggatgcagattctttccggccagattgccggagaaagctgcaagataaccaatctgattttcttcgttgtttgttattccgttgtccgtttgcacaatcaacactccaaacatctttccggaagccaattcctcttgccattctttccggcttgcaatatattctttcacttcttccgcagccaacacacacaatggatgaggtgtataatggaaaggataagtgaatttctccggcaacgcaaggtgagaaacgggtttcttgaaaaaatgtatcatcggtttatatatatgaatgaatgtgattacctttgcaaaagtaacgtaaatccgcgaattttattctatatttgtttgagagtttgagtgagataacgtggacgtttgaatgaaattgtatggataggatagaagaaaaaacaaaatttgcctttcttggtaacagtcacatggctttttgggcgctagatatctatttcccacaatgggaatgtctgaactatggtgctcccggtgaagggctggcctatgtggagtcttttgcggtagacacttccgattgccaggtcgtcgttcaattcggaaccaatgatatttatcagttgaacgatgaaaatatagatgaatatgtagagcgttatgtaaaagcggttcttgccgtcccttcactgaaaacatatcttttctgtatttttccgcgtaatgattacgatgattacagtacggctgtgaataaatttatccagatccttaaccggaagatacacgaaaaattgcagggaacagatattgtctatctggacgtattcaatcgtttattgcaggatggcaggctgaatccggagttgactctcgacgatttacatttgaatggtaaggggtacagtattctgacagaagcactgaaacaggcttccagtttgtaaaacatacctaaatacttcattccttgcttttatttataaatttggtggcatatcagtttatttttcctatttttgtccccaatttaatagtaaataacccccataaaaacgataagacttatggaaaaagtaattatcaattcgtacgaagaattcgaaaaactagtaggccaacagataggtgtttccgattatgtggaactctcgcaggaacgtatcaatctttttgctgatgcaacgctggatcatcaatggattcatgtagatacggaacgtgcgaaagtagatagcccttatcatagcacgattgctcatggctacctgacattgtctatgcttccttatttgtggaatcagattatccaggtgaataacctgaaaatgatgattaactacggtatggacaaaatgaaattcggtcaggctgtattgtcaggacagagcatccgtctggtgactactttgcactcgctgactaatctgcgtggtgtggcaaaagcggaaatcaagtttgctatcgaaataaaagaccaaccaaagaaggcgctggaaggaattgctgtattcctttattatttcaattaatggcaagctgttaaagaaacagattttatccccggaaatgatcgaaatacgtctcaaaagttagatacaaaaacttttgggatgtgcttcagatggatcgtttccggggataattttatccttttactcccataaatctgaacggctgtgccggtttaaactctttcgttgcatttccatgataagtttcaccgtttgcgatagataatttgagtaccggagctccttccgacaagtctgtttcccgtaagtttacccagaatgtattaggtgtcagacttgattcgaagaagtagagcaaattcttactatccgataccgttctccattgtgtggtggaaatttctggaaattcgggagtggatatgccataaggaacagaagtattacggataacgctgaatacgcttgctatggctattctcacatcatctgtttggggcagggcattgatataaaaactggctcttgcaaaacggtcggacggacggttggttccgggcaggaagctcaatcctcctattgatttccagtattcgtttagtgccagttgcttgttgtaggtaggggagttggtcattactttgtactccttgctgtggtaaacagtcagctttccactcgtatattcgaatattgcacaatcgcccgttgcgtcggaaatagataaatgcaaggttgccaggcgggaaccatccggcatcaggtccgataccacttggaaagtgttttcatcaatgaaagcgacagcctcgtctacggtggcgaagttatccagcatatattgcacccatgcagtaatggcaagtcccggtttactttgatctctgaccggatactccgtttcgggcaaccataacagattggcaaccaaacctttctcattcatcccgtctgtgctggcaatctcgaaagccgaagttaccacactgccatacttggacgtccatttcagggagttggctcccgtttctccatttctttccatacctttgggaaatacccaaagattgctgtgcatttctgttttccagtccatagaccggccggttgccaccattccattctttcccgaataaacgactcttgtacacataattttaatttctagttaaaggtttattataagctgcttttacagggaatccaacggatgcgaattcattccgcaaaagcgtattctgaaaacaataacgttccatttatgttttagataagtatcagatattaataaagtatcaaaaaacaggaattatgtcattaagtaatcttctcatcatattttcgtcatcgtttatggcgctgtttccggtgataaaccctttggggaatggttttgtcgtcaatggattctttacagacctcgatcctcaacaacggaaagcagccattcagaagctgacgctcaattttataatgatcggtgtagggacattggtgataggacatctgtttctattgattttcggtttggctattcctgttattcagttaggaggtggaatactgatttgtaagacggcaatggagctgttgggcgattcaggttcgtctgataaagaagaagccagcaagaatgtagacggcttcagatggaaaaacatcgagcagaagatattttatcccatcacgtttcctatcagtatcggaccgggcagtatatcggttatctttactttgatggcgtctgccagtgttaaaggtaaattgttgcaaactgggattaattatttggtcattgcgcttgttattatttgtatggcggccatcttttatgtattcctttcacaaggacagaggtttattcagaggttgggaccggtgggaaatcaaattattaataagcttgttgcttttttcactttctgcatcggtattcagatttcggtgacgggtatatcccagatattccatctgaatatactctaattgaacggtgagataaaagcaatagaaattatctgtttttctttgctttcatggctttcagggtgttttttcgtacggaacggatagcgggaaccagtaagtcgggctccatgatttccagtattgtgcgtaattcctgttgcagttccgggatggagcgtgtcagttgataagccagtttcatgcagagcgattgcacgcccggtggttcctcgcgggatatcatgcgttccatgcagaaatcaaggaaatccactcgtggcggatcggcggcaggttgctggcatatcaggttcaggatcattctccgttttcccgagtgtgggcaggtcatggcagcgtcaatcaattcttcttgtttccggctcaaccattctacatctgccttggagaaatgagtacatacccacaatgcctgataggaaacaatgtggtctttgtcgaatatcagctggtagacttcttctctaagacgctcgtcgtcctgtatgaaatggagtacttctctgatatcttcaatgtgtacacgttcggataatctggcacgtaagttcatgtttctttcgtttttgggaaattaatctctattagtggaatcagcttccggcagttgcaaatgaagaatagggaaaggtttacccatgctgtccgtttcatctctgccgatgacttggaatcccaaatggagatagaactggagtgctttttcattctgctcgtttacgtccaccttatccatctgctttttgtctcttgcatattccattaatcgtttgccatatccttttctctgttcgtcggggtgtacgaataccatttcgatcagttcgtcgctcaatcccatgaaggcggcaatctttccgttggcattccggataacaaaaagttcaacagcgggtagataatgcttccgcaccagtggtttatagaactggatatgttcttccgtcaggaaatcatgcgtgtggcgaacggacatttcccatacatggaggatttcatcatagtcttccggagtaggttgggagatgccgggcaggtagtagcactggtggtcgtagatgtttccgttgtaagtcagttctgcctgatgaagtgtaccttcatagatgaaaccgttctttttcagtactttctgcgaacgtttattgtgcggataacaggtcgctgtgatgaggctaagccgcaattcttcaaagccatagttgaggacaccctgcactgcttcggtcatgtatcctttgccccaatatgattcgtcgagccagtaacccaacattctcacttgtagattttcgcgtttagggtcggggataattcctaccgaaccgattagctgttttgtatcttttagtatcactgcccatattccctcttggttgataaatgtggaatgaagtatccggcgggattcatccaacgtacgatggggtggccatccggcattgtttcccaaattcgggttctggcaacaagcaaagaacgcttcagcatctctttcttcgaaagggcggagaaataaacgttctgtatggagcgtcacggggggaatactttctgtttcagtttcctgtcttgctttgtttttcgattcgtttgcagttctccgatatacgcactcaatccggtttccgtcaggatcgaggactacactttcaaagtatccgtctcccgaagtacgcggttcgccggcgatggtatatccttccgaacgcatttgttcggtgaagcgtaatacttcttcctggctgggaaaggtgaaagcaaagtgtgtcagtccaaccctgttttcttcaatgggagtgttctgtacatctgtacgactcatcagttccaagtctgttccctctccaaaagagataaaataggactcgaatcctttcttgggattgatatatttttcgttgctttttcctccgaagaagcggacatagaactcttttagttcttccagacgaaaagtccagatagcgatatgatgtagtttcatataaatgaattttctaatttctattactttgtttcaatcttcattcgtaccgaatgtactttgtctccatcttaatgctgcattacatattcgtaaacgatacgggaaatatcagcgataattttattgttcgcttgattattttcttcagaatccttcacgaagacagctatactataagtacgtccaccgggcaaaagaacgaaaccgatgtcattacaaccgatttgttgtcctttcgcattaagatctcccgttccggttttatgacctacggttacttttttgtcgagcaacggagcaaccagacggtcttgcccggtttgacattctaccattgtttgaaatatgaagtctttgtacactttgggaaacaatggcttcttacggaatatttccactaattcggctgcggctaacggagtagtccagttttcataacataggttcaagtcttcgtgcatggcagtttctgtaccgacgatggcacattcccgaattcctagtgaatggatatacttattcacagcatccggaccaccctgatagttgaaaagaatatcgcaagcattgttatcactctgctgaagtgtgtatcttaggaggtcggcaatactcatttcaattcctccttgcggatatttatctcgaagcggactataagtgtccggctttaaatccgatttcttaatgggtaaccgggtttccagcgattgcttctgttttcccatataatctgccaatgctaatgcctgatgaaacttgaatacgctcatcagtggatagtgaatatcattattgacagttaccgtatcttttccatcaatgatgacggctattcctatttcggccttctttcctttgatggcttctttcaactgtgtctcaagttgagtttgtcgggcaaacaggagggtggggaccagacaaagaaatactatgaatgaacgcataatcaatttctcttttaacgggttactaattctctattgaaatcatattttctgttgaagtcacaaaggtataaatagtaattgcctttgcaaattctcattcaaaaatagtgatgtcggataagaaattcctacttttgtgaatcaatcaattaatgagtagatattatgataagatgtcagtcggaattatttcaatcatcggtaaaattagtagatggattgaagatgaatacaaaagaagatttaaagcagatggcgaaaatattatgtctacctgttcccacaaaactgcgcaaagatgaatatgcaacctactttgcagaagcagttttggcttgccctgatatgtggcttccccgattgacacagtatgagctgactttgcttgataagttggtgaaagcgggaaccgatacgtatgtagaaactacaaattcatttatggtgagtacgttggaaattctgtctttcgtagcgacggatacttgtcacttggaagaaagtaaagtccgctacatgatttgtgatgaattgcgtgaagccgtagctccttatttaaataattatttgacttcggaaaagcaggcaatccgttttatggtagagcagtatgcttatggaatcataaatttatatggttatctgtcttatttcgatctgttaagtatgctggttgactatttgcaggattcggtgacgaaaagagaaatagccgatagtttggctaattcggcattgatacagcggctaacctttgaggcggtggatggttataactctactatttgtatacagtctccatttttggacgatttagatgatttggaagaaaaaatgtatgctcgtcgtgaaataacaaataggaagaagttttccaaagaagaagcttttgcggcaggaatgatgccgttagtcgttattcctaatccgtgttgggatgaattgaaggtatatatgatgaagaaactgggatatacggaggaaaaagcggatagcagtttggcatatttgtggcttactgctcaaacggaagaaaattcaatgtctattattacttcaatgattagccataaactttcttccatgcaggagctgcaagaggctattgaactatttatggattatgtgaatcattgtccccgttggttcctgaaaggttattcttcggatgaaacattcgttttatttcaaaaagacaaatttagaaagaatcctccccgcgttgttgcaggcccgaatatgaaagctgccggtatggacattactccggaaatgcaggctgggatagacaatctgtttcgtggtatgccttccggacacacggtcggaaggaacgatccttgtccctgtggaagcgggaagaagtataaaaagtgttgtggaaggaataattgaccttataaagttcgtatctttgtaaagttttcaaataagcatgattatgaaaaagtctataaaacgtttacccaagcgaacgcaggaagaattgacagtcttgctggatttagtgcgtaaaagcatcgggaattgtcagatggttatcctgttcggaagttatgcaaggggaaactatgttttatgggatagtaatatagaattcggtgttcatacttcgtatcagagtgattatgatattcttgtggtcataaccggaccggctaagcaagtggaagagaaattacaccgtattacgaataaatatcatgacttgtttgcagatcgtcgtcatgcttttccgcaatttatagtagagcatattaatactgtaaaccgtaacttggaagtcagccagtatttctttacggatatagtaaaggaggggattatgctttataatagtggcaaacatgaattggctaaaccacggaagttgagttttagggagattcgagatattgcacaaaaagaatttaatgaattatatccatatgcttgcgggcttttagaaggggtgaaagaatattatttgcctaagaaacaaactaagatttctgcttttcttcttcatcagacgtgtgagaaactttataattgtatcctgatggtctttacgaactatcgcccaaagagtcataaaatcaaagaacttggtgggatggtgaaacgtttttctatggaattaactgcagtctttcttcaaaatacggacgcagagaaagaatgttttgatttattatgccgttcttacattgaagctcactataacaaagatttcagtatctcgcaagaacaactggaataccttatttctcgcataggtattttgaaagatataactgaacgtctgtgtaaggagaaaattgcggaatatgatacgatggcggaataattgtcccctgtgaaataagtaggtgtcgcatttataacttgaattcagcttcagggtcctatgaaatgaaaaaacgaaatatatctgtcatctgtcacaatttataaattaacttccagagtatgagtgcttaatggtgtgacagcacaaggtgatagcagtgtgatagcaataatgctgtcacccaaaaacaaagaaaaaatcaaagatactgtttggaatttgatagtatcagccatagaaagataaggcgttctatttattatccccgtacattatgagttgtgtcctgccttgaagccaacggtttcaaggtgcgaaactgttggttctgcggtttgaaactttagtttcatacgcttgaaactctagtttcaattacttgaaaccattggtttcttaccgatgaaactacagtttctcttagctgaaactttagtttcaagcaaaggaaactaacttgaagcgtaactgcgtgtaggcgaacctgtttctttcccccaaagaaatacttgacatatcaataattttctaaattaaagtattgtttcccttgtcggttccggataatatgagtaatttagcagtctcaacgatcacaaagacgctgacaaaacaaattattatcaaattaatgaaaattactcaatttcgtaagaatgaagatacgatagcgctcagcgtaatggatcttgatatactggtaaataagataaagacagaaataaaatcccgccctgtttctacattcagagagcatctgcgatataccctttccgatgaacggtgtatgtttgccgataaactgcccaagataattccttccgctgaattccgtaaagtaaacggtcagaaacagatgaaaaactacaacggtattgtagaactgaccatcggtcctttatccaataagtcggaaatcgctttagtgaaacaaaaagcctgtgagcaaccacaaacccgttgtgtttttatgggttcaagtggtaaaacggtgaaaatatggactaccttcacccgaccggacaactcgcttcctaaaacacgggaagaagcggaactattccacgcccatgcttatcgactggctgtgaaatgttatcagccccaaatcccattcgatatacttcccaaagaaccgactctggaacaatattcgcgattatcccacgatccggacatcatatatcgtccgaattcagtccaattttatctctctcaaccatcatcaatgcccgaagaaaccactttccgggaagcggttcaggcggagaaatctccattgactcgtgccgtaccgggatatgatgcggaaaatgccttcctgatgcttttcgaagccgcttttcggaaagcgtatgccgatcttcgggaagcgggacttgaattgcgtgaaggcacatggcatcctttagtcgttcaactggctaaaaactgttttgcttcgggacttccgcaagaagaagtcgtgagacgtaccgttttccacttctatatgtataaacaagaagagcttattcggcaaatgatcggcaatatatataccgagtgcaaaggcttcggcaagaatatcagcctaagcaaagagcagcaactcgccttgcagactgaagaattcatgaaacgccgctatgaattccgccataatacccaaattggtgaggtagaatatcgtgaaaggctttcttttcgtttccgcttcaatcctctcgacaaacgtgcgttgaacagcattgctttggatgcacaaatggaaggcatccccttgtgggacagggatattagccgttatatttactccaaccgcgtccctgtattcaacccgttggaagattttctctaccggcttcccgcatgggacggtaaagaccgtattcgtgcattggcagccaccgtcccttgtaagaatccgtattggatggatttgttccaccgttggttcctcaatatggtttctcattggaaaggaagcaataaaaagtatgcaaacagtgtttcgcccttactcgtcggaccgcaaggaacacgtaaatccaccttttgccggagcataatgcctccttccgagcgttcctactataccgacagtattgatttttcccgaaagaaagatgccgaactttacctcaatcgttttgcgcttatcaatatcgatgaatttgaccaggtgagttcgacacaacaaggctttctgaaacatattctgcaaaagccagtattgaatgtgaagaaacctcatggcagtgccgtgcttgaaatgcgccgttatgcctcattcatagctacaagtaaccagaaagacttgttgaccgacccttccggcagccgtcgttttatttgcatcgaagtgaccggagtgattgacaccaatcgtccgatagactatgagcagctttacgcacaagctatgtacgaattggaacatggcgaacgttactggttcgaccaggaggaagaaaagatcatggtggaaaacaaccgtgaatttgaacaagtcccaccggaagagcaacttttcttccgttatttccgtgccgcacagcctgaagaaggggagtggttgtctccagcggagattatggaggatattcaaaaaggcagttcaatcccgatgtctgtcaagagggttaattccttcggaagaatactgaaaaagcaagaaataccttccaaacatacgcgtagcggtactctttatcatgtcgtaagactaataaccaggtgacggcaaaaatgccatcaccctgctgtcacctcttgctgtcacgggcttatcggttcattactaaactattaactcctaaactgtgacagatgacagcaacttaccaaatatattcttctgtgtaacgttggtaagttggttcttcttttatccctttattacggaacagttgttttatataggcttggtctttaggcataagcccccgttctccacgatagaaccgataatatcccgttttcccgtagtgtcccactaattgtattctgatactgactgcatcctcataagggattctgtcgagcaaccgttttagtccccatgccacatgaactttgacagcagtcttgaaacattcgcattggtttccatccgcaggataacgtgccggattaacgatggagatataaagatagtcggctattttatcttgcgtaactacgtggcgcaagcatttcgaggcttgtggacattggtcgttgaaacaccgggagaaattgtaggggacagacgggctgtcggattcttctttcatcttgtagggtttattttatttgtgagatactgttgttaatatgttaatatacgggaaaatattcttcgcaaaagtagggctttattttgggaatgggaagtgtttggacaaatattactaatatgcaaagaatcttttatagagaaattgtgttgtgatgtatcaaaaaatctctatttctttctcatattctatatttttacctatttttgtaacttccgattatatagccttatcggaagttacaaaaaagacacacacatgaaaccggaagaaaaggctcgaataataattgaccgtatgcttaatgatgcgggttgggaagtagttgatagaaatcattattctcctgaagtatctgctatagcagtcgaagaaggcttgctgaaaggtaatcgtgaagctgactatttactttttttaaatggtaaagctgttggcgtattggaagcaaagaaagaatctgtgtcaatttattctgaaattgtggcagaccaggctgaaaaatatactagaggtgtacctcattggtgtcaggcttggatgaatcctttacctttagtttatttgtcaaatggaagggaactgttattcagagatacccgtgaagttgattctgaatatatttctttgaataaaattcattctcctaaagaaatagtaaaactattaggacttaaagatgattttgcaggacttccaactttaaaaaggaaaggattaagggattgccagtatgaagcgataacaaaattagaaaatagttttcgtagcgggcatgatcgtgcattgatggttttggctacgggagcgggaaagacttataccgcatgtttggctgcctatcgtttgttggctttcacttcaatgaagagggttttgtttcttgttgaccgtaataatcttggaaaacaggcagaaggagaatttggaacattccgtttgacagaaaatggtgatccgtttaataccatatttggggtagaaagattgaaaaccgcgaaaatcccaaatgatgccaatgttgttatcgctactatacagcgtttattttctttattgtccggagacgattttatagatgatgataatgaagcggattatgttgtcgacggcactagaaatatgaatttgccagttcatcctaacttgcccccggattactttgatttgataattattgatgagtgccatcgctctatttatggtagttggcgaagtgtgcttgaatattttagttctgcaaaaatgattgggttaacagctactcctgctgttgaaacattagccttctttaataacaacttaatagtgaactacactcttgaaaagtcaatagttgatggtgtcaatgttgattatagggtgttccgtattaaaacacaagtaaccgaagatggcggtgcaattcgcgagggggataaagtacgtaaaataacccgctatacaggtaaaactgaaaatatcgaaacacaggaaacgactacttatacaagacaagaactgaataggagtattattaatcctgctcaaataaagttgattttagagacatatagagatgcggtttatacagaaatgtttaatgatccccaaagagaacctaattttgactatttacctaagacattaatatttgctttgaatgatgctcatgcacgtaatattgttaaaatagcgaaggaagtctttggacgtgaagatgatacgtttgtgcagaaaatcacttattcggctggagatagtaatgaattgatacgtcattttcgtaatgataaggagttccgcattgctgtaactgtgactttggttgctactggaacagacgtgaagcctttggaagtggtgatgtttatgcgtgatgtcgagtctgactctctttatactcagatgaaaggtaggggagtacgtacaattggtgatgagcaactgcgtaatgttactccaaatgctcatagtaaagatttgtttttcttagtcgatgcggtgggagtaacagaacatgagcattatgtaacaacttctggagcgggaagcaatgctgaaacattattgtctttaaggcaacttttagagcgtatctctcatggtgaactgccggatgaacatctgcgattgttggctagccgtctgtcaagaatacataataaggcaaatgaagaacagaggaatgagtttataagattggctggtacagatatgcgggatatggcatctcgtatatatgaagctttggataataatctgttgccggaatatgtgaatataaacgaaccgaataacgaacggaaaggcttggtgcgtcctctcgctattcatcccgatgcccgtgaatatctgtgtattctgaacgccggatttgtcacaattttaatgcccggtgaagatacattgattgagaaaggattttccatagaggaagctcacgacacgactcaggcgtttgaacaatatgtaaatgaacatagagatgagatagaggctttacgcattatttataacaataacggagaatctatcacttatgcaatgcttaaggatttggagaatcggatgaaaatggagaattacaagtttactccttctcaattatggaatacatactctattgttaacccttccaatgtagtacattttgggacgaaagaagaaaaagaagctttgactaatattattcagttagtcagatatgcttatcatcaggtgacagaacttcgtagcctgtcatcaatggctgcccaacgttttgaattgtggtgtgggcagatacagcgtacaatgactgaggctcaaaagaatactatccgtcagattgtgaactatattgtagcgaatggttcttgtacaataaaagaaataaaggaagatgataaaacaatagcgcttcagatgatacgtaagtttggtactatagcagcggtgaatgaggctattgtttcattatctcagtttttaatttataatagaaaagtagcataaaattaatatggcaaaatcaaattcgaatgagcaaggtctgactaaaaaggtttggacacttgccactacgttagcggggcaaggtattggatttaccgattatataacccaactgacttatttgttatttctgaaaatggatgatgaaaacgttaaattgcttgacgaagaatcagccatacctgaaggatatcgttgggaaaacctgatagaattggatggtcttgatttgataggtcagtatgaaaatacattgagaatactgagtgagcaggataatctgattggtactatctatacgaaagctcaaaacaaaatagataagtctgtatatttaaagaaagtcataacaatgattaatgaggagcaatggcttataatggatggtgatgttaagggggctatttatgaaagtattttagagaagaatggacaagataaaaagagtggagcaggtcagtattttactcctcgttctcttatatcggcaatggttgatgtaactcgtcctcagattggggaaacggtttgtgacccggcttgtggaactggtggttttcttttggctgcttatgactacatgaaaaaacaatcacaagacaaaggcaaacgggactttttgcggaataaagctctacatggttcggataatactcctttggttgttacattagcttcgatgaacttgtatcttcatggtgttggtactgaccgaagtcctatcatatgtcaggactctttagaaaaagaacctaatatactagtgaatgtcattcttgctaatccgccttttggaactcgtccttctggttctgtcgacattaatcgaagtgatttttatgttgaaacgaaaaataaccaattgaatttcttacagcatataatgctttcgctcaaaacaggcggacgtgcagcggttgttttgcctgataacgtactgtttgaaggtggagctggagaagtgattcgtaagaaactactttcagaatttaatttacatactattttgcgtttgccgactggtatattttatgctcaaggtgtaaaagctaatgtgttattctttacaaaaggtagtagtacgaaggatatttggttttatgattatcgtacagatgtaaagcatacattggctactaatccaatgcaaaggcatcatcttgatgatttcgtttcgtgttatcatgcggaggatataaatgctcgtgtagaaacatataatgctgaaactaatccgaatgggcgttggcgtaaatatagttgtgatgaagtaataactcgtgacaaaaccagccttgatgtatcttggataaaacagggaggggatgaagtagactattcattatcagaattaattgatattctcaaagagaaaagtgataacataagtaaagcggtggctgaacttcaaaaattaatggcaaatatcgaggactaatggacacaaagaaactacgacagaaaatattagacctcgctattagaggaaaacttgtcccacaagatccaaatgatgaacctgcatctgttttacttgaacgtattaaggaagagaaagaacgtttgataaaggagggaaagataaggaaaagtaagaaaacagtttcttctgatacgccacattatgggaatgtgccgtttgaggtgccggatggatggtgttggtgcaaactggacgatttagcattttataaaaaaggaccatttggcagtagtcttactaaatctatgtttgtgccagattctcctaatgcttataaagtttatgaacaaaagaatgccataagtaaggatgctacgttaggacactattttatagacaaagacaagtatgatgaactcaaaggatttgcggttcaaccagaagacattattgttagttgcgcagggacgattggggaaacatacgtgctgccactcaatattagagagggtattattaaccaagctcttatgaccattagactttttgataagtccatttctaatttctatttgctttactttgatttcattcttaaaagagaggctgcaaaggaaagcaagggtactgcaatcaagaacattccacctttcgacattctaaagaacttctttataccattaccgcccccaaaagaacagattagaataatcgaaaaagtatcttattggctatcattcgttgatgccattgatagtgaagaatccgaaatgagtaatctcatttcaaaaacgaaatccaagattcttgacctcgccattcacggcaaacttgtactacaagacccgaatgatgagccagccattgaactgttgaagcgcataaatcccgacttcacaccttgtgataacgggcattatacgcagttgcctgatggttggtgtactacgacacttaaagatttatgcgaaaacatcaatggattgtggaaaggaaagcaagaaccatttgtccatgtgggtgttatacgcaatgcaaattttacaaaagactttaaattggactattcaaatattgagtatattgatgttgaacaacgaactttttctaaacgccatttaatgaatggtgatttaattgtagagaaatcaggcggtagtgataataatcctgtaggaagaacaatactctatgaaggtgaaagtggcgttttttcattcagtaattttacaatggtattaagaataaagcatagcaacaccatattaagcaagtttctgtactattatattctggctatatatcagaaaggagctatgagattgatgcaaacacagactactgggttacacaatctgattcttgataattttttatcaatacctgtacacataccttcactctctgaacaggagcgaatagttaacagaatagaatcgattttcacctctttagatacgataatggagagcttataaactctccattatcgtatctaattgtgcgaatattttacagactgtataaacaattcgtttttgttcatttattggaggaatagcgataattatattttcaatgatatttttacttactctttgttgacctacaactccattaaaagaacctacacattggcttatgaaataatctgatttaaagaaataaagtccatattgagcatccataaattgagacctaaatacatggagttcagtagtgcctacgccaataccatttggcagaccttttagaactactgactttctattttctaaacatggagatattttcgcaactgcaatgtctccgtctgcgaaatgcgtaaaaccagttttgattttgtcccagcgtctagcctcgtatttaaaagtattattgtaaccatcagtgatattggccatcggaacaaaaccagcttcaacattatcatctaccttatttttaggattgatcatgaacacctcttttatcgttgagtagcaccaaccatcaggcaactgcgtataatgcccgatacgttttgctatattgttactgtattcattataaatcaatgcaatatggtaacaaaattcaaaaatcatttggcaaaaacgaatcttgccaagaacaccgtcacatcatatgtgtggacggtacagtatttccttaatcattatggagaggtgaacaagaagaaccttttggcgtacaaagggtatttggtagagaatttcaaacctcagacagtcaatctacggttacaggggattaacaagtatctggagtttacaaaacaagaaaagctcaaagtaaagttcgtaaaagtacagcaaaagaacttcttggaaaatgttattagcgatgcagattacaaatttctcaaagcccagcttaaagttgacggttacgaggagtggtattttatcgtgtggtttatggccgctaccggagcacgtgtcagcgaattactccacatcaaagcagaacatatcaaggtgggctatcttgacctgtacagcaaaggtggaaaggttcgacggctatacattcccaagaatctacgaacagaagcagaaaaatggttgaagaatcaaggcttaacatccggctatatctttctgaaccgtttcggacagcgcattaccactcgtggaattgcatatcaactcaaacattttgccgaaaaatatggaatgaacaaggaagtagtttatcctcattcattccgtcaccgtttcgccaaaaacttcctcgaccgctttaatgaccttgctctacttgccgaccttatgggacatgaaagtattgaaaccactcgtatctatcttcgcaggacagccagcgaacagcagaaaattgtggataaagtggtgaattggtagatcaacatcagcccttagaagtgtattctgctacacttctaaggaattttgaatgttgtcaagaacagaaaatagctcttttattttttgaacgattcgttgttgttctttaataggtggtagaggaataaatgtatttacaattatttccttagatatatttggttgtgctccgccacctccttttgctataaaagcactcctttgaaacaataaaaaatagaagaggtataattgggcaatggcattaaactctatacaagcgcaacatgcttgatttgtggtagcagggaaagttaatattcctaatttcccaatcgttgcaccatacattgctattaacacactccctgtaggattgattttagcagaagaatttaagacggcttcctctgttatactttcaggaatatccgtaatcaatccgtcatttaaatctcctgttttaagccatggtatatttccaccataataagatttatttgaacggctaggtgtaccaccagattgccatattccaattgtccctaaatttgtttgacaccatccttgtggcaacttctcactatgcccgttatcacaaggtgtgaagtctggatttatgcgcttcaatagctcaatggcaggctcgtcatgcgggtcttgcagtactaactttccatgaatagcaaggtcgaggattttgctcttggtttgcttgatagttgtttgtaaattagctttgccttgttctatttggtcaatcaacgcaaaccatttctctatttctaccacaatacgttgttgttcggcaagaggaggaagcggaaatgataaatccgacaataccccgatatataattccttttgattggtacttcctgcaagattatcctccaaatgccgttgtataagttgcgatgagatataagcaaaaacaaactcagatttaatctcgtttgttgtccttataactgagacatgagaatctggcacaacaaaaggataattcttcaaatagctttcgtggaaaagtcttgttcgtccaactgttccagttcctgttgaattgacaagcacatctcctgtttttagcttgtattcctcgctccacttacaaattgtagatgggtctaagaagcgtgcttgctctaaagatataccgccttcttttagattacatttttgagcaaatacaggataggttttatccgtatctgaatactttggggacttacctctagataagaacaaacatatttcttctagtgtcgtccacacccaattatctggaatttcaaacggcacgttctcataatgtggcttatgtggttttaaagtaataaacaaaagtggtttattgcatgagtattattaatagcgacaatattattctgtgtaatatagatagtaggtatatttcaataaaaaaacacaggtgtttactatattaaaataactattctgtatctttgtataacaaatatgataaacagactgctgatgaagcttttgctattgtcagaagcactatatttaaaatagcagaacatgcgggcaaaggtgaattggaagcaatagagaaaatagatgagttaggcgatgcttacaaatggaaaatagcatttttatattcagatgagactttaataccagtatataagcgtgatatgttggttaagttggctagttattttggtatgtctgtcacaaataaaactaaaatttctgatttgcaaaggttcctgatagaacagaaaggcgaaaaagaccttttcgaattttatgaggagttactaaatattgtaaatgaattagatagttcaaatatggaacataagatttggttatacgctccgggagaaaatgcatctaagtgggatgtgtgtttatctcaaaacataatgtgtattggttgggatgatatgggtaaccttttggaatactcttctaagaaagaaatggcagctaaattgcaggatatatatggcaagccgggatcctcgtttaaaaatgatagtttggcattatgggagtttgcttatgagatgcaagtgggtgatattgttatagtcaaaaagggacagaatcaaataatagggcgtggtattgtgaaaagtgactatacttttgatgattctttctctgattttaagcatgttcgtaaaatgcaatggacgaatgtcggagaatgggagacagtaggcaagaatgtccaaaagactttgaccgatataaccaagcagccggattctgtgaaatctttggagaagctatttgaaaataaatctcaaaaacaatattggtggcttgtggcaagtcctaaaatatggagcttttcgaaaactccggttggcgaaatacaagactatactctttataatgatagtggaaatcaacgaagggtattccaaaattttattgatgcaaaagaaggagatgttgttattggctatgaagctactcctgttaaacaggtggtagctattgcagaaatagccaaatctgccgatggacaaaaaatatatttcaaaaagactgagagcttattgaatcctgttgattattcagttataaaggatataccgggattaagtggcatggaattcctgaagaataagaacggctcgtttttcaaactgacaaaagacgagtataacatattgatgaaattaatacgtggcggaaatcctatgcataatcctcaatattccgaaacaaattttttggataatgtatttataaaatcagaagagtataacaaattgagaaacctgttgttggcaaagaaaaatgtcatattacaaggcgctccgggtgttggtaaaacgtattcggctaggcgtctggcttattctattataggggaagaagatagaactaaaatagagttcattcaatttcatcagaattattcctacgaggattttgtgatgggatataagccaaaagaagatggtggttttgaacttagacgaggggtattctataatttctgccggaaagcccaaagtgatccggataagaagtatttctttattattgatgaaattaatagaggaaatatgagtaagatttttggtgagttactgatgcttattgaaaaagattatcggggcgaaaaacatcaaatccgtcttgcatacaatgatgagtatttttttgtaccggagaatctttacatcataggtatgatgaatacggcagaccgtagcctggctatgattgattacgctttacgtcgtcggttcagtttctttgatatggtgccgggatttgattcggatggtttcaaaaagtatcaggagaatcttgattgtgacgcctttaatagggtgattgatgccatcaaagctctgaatgttgagattgctaaagatgattcactcggaaaaggcttttgtatcggtcatagttatttctgtaatcaggaatctattgatgatatgtggcttggaaatgtgattgaatatgatattgcccctatgttacgcgaatattggtttgacaatgataagaaattcaaagaagaaacagacaaattattgagcctgataaaatgacaatagacaaaggtatattcattcgcaatatctattatatgttgacttatgcttttcaagagcttaagcagaataactatgaagaaatagcaggtgaagaatttgacgagattcatgatttatttgccgaaattctagttcgtggcatttcgtatcaacttaagcaagggttacataaagaatatatttcctgtcatggttcattatctacgttaaagggcaagcttgatataaatggtactatcaataatttgatgcgaaaacaacagaaaatagattgtgagtatgatgaattatcagagaataacaaatttaatcagatattaaagacgactgttcaattcttgctgaaacatccgaatgtcaaatcggacaggaaagcttcgttgaagcgtcttatgcttttctttagcaatgtagaagttattgatattccgacgataaactggactactatgcgctttgatagaaattgtaagacttatcagatgcttctatatgtttgttatttcattctcgacgggatgttaatgactacggaaaagggtacgtataaaatgagggatttctccgatgaacatatgtgtaggctttacgagaagtttgttttggaatattaccgaaagcattatccggaattaaaagcaaaggctactcaaatagactggaatattgataaagaacagtctacttccagcattcttcctataatgcggacggatataacgttgacatttaaagagagaatattgattattgataccaaatattatagtaaatcaatgcaatgtcaatttgacaagagaactattcattctaataacctgtatcaaattcattcttatgtaatgaattatgatgttaatcatgctgggaacgtggatggaatgttgctgtatgccaagacagaagaagatataacacctgatggacagacgacatttagggatgggaatatcatatattaccggacacttgatctgaatcaggattttgagaatatcaagaaacaattggatggatttctagtacatggtctataactattattggtgtaatacttcgcttgccatgatataacagagaaatcatcccctatctaatttatagtaatattttattaaaaataaaaccattattactttcaattcttgataagttactctatctttgtaaggtaacacaaacaaaagtgtaaccttatatgaatcaagaccattgtttagtagaacagtttgaaatgatatttagagctcatttctcttcagtgaagttttttatcaatatgtttcttaaatcggaagcagatgcggaagatttggctcaagatgtatttaccaaattatggactaattttgagacgtggcaaaataatgatggaaaagaagggtatatatacgctatggcaaaaaatgttgcatttgattttatcaagcacaaaagactggaaaatgattatcgggaggaacaaataaagaaaagtacaattaaggatttgttaggcttctcagatccgttaaattcgctttattataaagaaatgcaactaataataagaatggctcttgaaaactttcctgaacgtcgcagaaggatttttgagatgagccgtttcaataatatgagcaatcaggagattgcattatccttacatctttctgttcgtacaatagagcatcagatatatttgtcgcttcaagttttaaagagaatcattttaattttatttttcctgtatttactttaagtagctggaatgtttcaatcgttatatatgaaatttcaaaatctaatataatgataacatgaagaattattttcagaaaatattatccctttttgcccgacataattattcggaacaaacaaatcaaatgttttacaggtggttggttgataatgaatatgaaaaagaaaaggatgaagcattacaggagctttatctagaagcaagaaaaaaaggaaaagtattcgacctggagaaatcactggaacgttggaagttagataacaatcttacacatgttcaacctcaacaaaagtccgataaaaaactgtttatgcgattgtggcaatcggtagctgttatattattaatagtatctatatctttaggatatctgctttgtaaggcagaaaaagacgattcaggaataactcagcaatgcatatcgggcactcagatgaagacattttttttgcctgacggaagtcgggtaagcatgaattcgaggagtatgttattatatcccgaacaatttacaggaaagtaccgtagtgtttttctaattggcgaagctaattttaaagtaaaagctaataaaaacaaaccgtttattgtcaaaaccaatgattttcaaataacagctttgggaaccgagtttaatgtatccgcatatactgaagataataatgtttttacaactctaataacagggagtgttcttgtggaatttgacgacttgggcaaaaagaagttgcttaagccaaatgaacaattggtgtataataggaagagccgtcaagatactctgacttatcctgatatgaaagatgtgacagcatggcaaaaaggtgagttggtatttaatcgaaagactataacggagattataacgatattggaacgtaagtacgattgtaagttcttttataatcagcatagcttaaagaatgatcgttatagtttcaggtttaaagataatccacctttgtctgaagttatggatgttattgttgatgtagcaggagatttatgttttaagatagaacatgataaatgctatattatgcagaaataattttgatattagaaagttaaagcggtggaaggtatgtcgaataactaaaacggagaaaggaggaattattaagcttttagaacgcattacctaagcaaaatagtaaccatataaaaagtaatactatatgaaaaatttgaaatacttcttgttactcgttgtagcaatggtggcaggaactttgatcataagttgcagtagtgatgactacatgggagaggcacaacaacaaggtatttcgccaactacttgcggcgtcagcgacaagatgccgaagttgactacttatattgaaactaatgatgtaaatcctctaaatgcaggagagtactattttacaggtacggatccgcaagagcaggtgattgataatgtgattctgtttgcttctaatattcggggtgcggctagtactgttcaattgtatcataacaataatcagtctcatatattgaccaatgccggtacgcttatcgctcctttacaacagaaaggtatcagagtctctttagggctgttgggtgatcacaccggagtggggttctgtaacttgacaccggctatgattgaaagttttgcacaacagattgccgcttgtgttaagcaatacaatttagatggtgtggattttgatgatgaatatgcagactattggaaggcaccttctaatttaccttcaccaagtactacgatttttggaaatcttgtaaaaagagtgcgtcagttgttgcctgataaactgattacagtattcagttttggtggttatacaaattttgatgcgactacaatgaatgccattagttacatgtggcctgatttcggggcggattggagtactccggccggattagggaatagcaaatgggcaaagatgtcaatacactgtacggatggtagaccaagtgcaggtgtgatacaaagtagcgctgcaaattatagtggctatggcgccattatgatgttcaatctacgcgagtccggtcaaacaagcttaatgaataactttgcttcaagagtttggggaggcaagaccgtatctcgtacgacgactatctatgcgaagaattattaagatatcaggacgctccatgtgaatgaattgaagactggaagtgatagactttcagagaaggacacttccggtcttttataaattaacctgaatatacaaactgcagatgcctttcatttgttgataggcactgcttaataataaagatatatgtgaaaaagtatctatgccaggaatcttcctgccttggatatgaaatcgaaaattaaaacagatagacatgtgttgcgaataaaaaagttagcaaactaatacttaaaattcatgttacacagttatacattgaaaaatgataagaaggcaaaagggataagatttgtgttgtttttatttatggttgtaatacaagctacagcttttgcccaaggtggtatgaaaattactattcaaaaagaaaatataactgttattgaagcactgaaagaagtggagaagcaatcaaagctttcagtaggatataacgattcgcaattaattgataaaccggctatcaatctcaatttgaaaaatattgatttggaaaaagccctctcgattatccttaaaggaacaggatttacttatggaattaaaagaaattatattaatattattcctcaaccaaagactggaactgtggttgttaaacaggtaacaggaagggttgttgatgagaaaaatgaaccactgataggagtaaatatacgggtagaagggactgatgatggaactgttactgatttggagggtaagtacgtcataaaagcttctataggtagtatattaagctttacttatattggctatatttcgtcttatgtaaaaatagcagataagaatgtgtacaatatacaaatgtctgctaacgtagaggcgctaaatgaagtagttgtaactgccttgggtatcaagagggaacaaaaggctctgagttacaatgtacaacaggtaaaatccgaccagttgacaaatgtcaaggatgcaaactttattaatagcctgaatggtaaagtcgcaggagttaatataaacagtagttcttcaggagtaggtggagctagcaaggtggtgatgcgtggtacaaagtcgatagaacaaagcagtaatgcattgtatgttattgacggtattcccatgtttaatttcggaggtggcggtagtatggagaatggttcacagggagtgactgagagcattgccgacatcaatccggatgacattgaaagtatctcagtgctgactggagcagcagctgccgccctttatggaagtaatgcggcaaatggagccatcgttattaatacgaaacgtggcaaagttggtaaattgcaggtttctgtgtctagtaataccgaattcgctaaaccattcgtacttccacattttcaaaatcgctatggtacaggcagttcgggaaaagcaggtaattctactacgttgagttgggggactttattaaatgacgcatctcgtagaaactatgaaccacgtgatttctttgatacggggataacttataccaattccattacattatcaacgggaacagataagaatcagaccttcttttctgctgctgcggttaattcggaagggattgtaccaaacaaccgttacaaccgttttaatttcaccttccgtaacactacaaactttctgaatgacaggatgaagcttgatgtaggtgcaagttatattattcagaatgaccgcaatatgactaatcaaggtgcttactcaaatccgatagttcctgtttatttgtttccacgtggcgacgactttaatttgataaaagtgttcgaacgttgggatccggcccgtaagattaaaactatgttttggcctcaaggggaaggagacttgcggatgcagaatccttattggatcgcttatcgcaatttacggacgaatgacaagaagcgttatatgctgtctgtctctttaagttatgatattacagactggctgaatatttcagggcgtgttcgggttgataattccagtaccaaatatgaacaaaaattatatgcaagttccaatactactcttactgaaggtagtgcacagggattttatgctatatctaaacctgacgaaacacaagtgtatgctgatgcgttggcaaatataaataaacgtttgggtgattattctattgtggtcaatatcggggcgagcatcgtagataataagtatgacgaattgagttatcgtgggccgatacgtgccaatggtattcccaatgtttttaatgtgtttgatcttgacaatacgcagaaaaaagcacgtcaggatgaatgggaagaacagacgcagtctatatttgccagtgctgaagtagggtggaagagtatgctttatcttacgctgaccggacgtaatgactgggcgtcacagttggcaaactcatcttctacttgtttcttttatccgtcaattggactttcggctgtcgtctctgaaatggtgaaactaccttctttcgttgattatctgaaagtgcgcagttcgtttagttcggtgggtatgccttatcctcgtaacttgacatcgcctacttttgagtatgacgaaactactcaaacgtggaagccgaaaacacattatcccattggtgaccttaaacctgaacggaccgattcatgggaattaggcttggatatgcggcttttcaaggactttaatctcagtttgtcatggtatttggctaatacgtttaatcagacgttcgatccgaaaatttccgtatcatccggatatactaccatttaccttcaaacaggatatgtacgtaaccagggagtagagctttcatttggttacggacatacatggaagaaagattttcgctggcaaagtaattttacattaagccataacaagaacaaaattatagaattggtaaaggactatatacatccggagactggtgagcctataaataaagatcggctggatgtaggcggactcggaaaggccagattcatattgaaaacaggaggttcgctgggtgacctttacacacagtctgatttgaagcgggacgacaatggaatggtagaaatttctcctgcgggtacattagtaacagtgaataatcgacctgatattaaattaggaagtgttttccctaaatgtaatttggcatggaacaatcagttttcatggaaagggtttaatatcagtgctttagttactgcacgtataggcggtattgtttattcggctactgcagcggccatggatcaatatggggtatctgaaagttcggcggttgcccgtgataatggtggggtattagtgaatggacgtaatagggtggatgcgcagacatggttcacggctatcggttcacaaagtggtctgccacagtattatacttatagtgctaccaatattcgattgcaggaggcggctatcggttacacgcttccacgtaaatggttgcatgatgtatgcgatattcagttgtctgttgtgggacgcaatctctgtatgatttataataaagctccttttgatccggaagccgttgcaacgactggtaactattatcaagggatcgactttttcatgttgccgagtacccgtaatgtcggtttgaatgtgaaaatcaacttttaacagataaaaagtagtcactatgaaatatataacatctaccataaaattgctttcgctagcgctattgcttattgtcggttacgcttgtacggataatttcgataaagtcaaccggaaggattatcaggttgacaaagaagagctggggcgtgaaagttataacgtaggcgccagtcttaaaggattacaagggttggtgattcctacggaagaacatctctatcagtttgttgaagcacttggcgcaggtgcgtttgccggttacattggttgtactgtagaatggacggctaagtttgaaacgtataatccaccaatagattggcaagaagctcctttttcagatttagtcacccgtacttatccgttttatcgggacttgttggataaaacagacgatcctgtggcgttggcactggggaaactgtttcgtgtggtcatcatgcagcgtgtgacagatatgtacggtccgattccttattcaaaaatcatttctaaaacaggtaagatttctcttaccgtaccttatgattcgcaggaagaggtatataagcaaatgttcagtgaattggacgaagtgagtgatgtccttagggataatctcaatttgagtgcggaagcttttcgtaaatttgatgatgtatatcaaggcgatctttccaaatggctcaaatttactaattcactcaaattgcgtatgaccatgcgcttgacttatgtaccggaaatgcaggcggaaatacaacgaatagccgaagaagctgtaacggcaggcgtaatgacggaaataaatgataacgctttcttgaaagtggaagaaaatagggttgctatgatttttaatgactggaatgaccagcgtgcgggggctgatattatctcatatatgaatggttataaagatccgcgtcgggaaaagatgttcactacagtgaaaatgattgtatatgatgaaaacttccaaccgcaagaggttgatggatacgcgggtattcgtattggcattgatgtgactaccaaggatgagatggtaaatgcatacagcataccgattatcagcagtaccagtccttttttatggatgaatgccgcagaaatcactttcttacgtgccgaaggtgccttgcgaggctggaatatgggtggggaagctaaagatttatataatatggcgatagctctttcttttgaacaatatggtctgtcgggctctgaaacctatgcggagaattcgactgacactccggaagcgtacaatgatccgacatttgcctatactgattgggaaggtccgagaagtactattactattgcttgggaagatggtgcggataattttgaacgtaatcttgaacgtatcatcactcaaaaatggattgctaatttccctttaggtgttgagtcatggagtgaactccgccgtacaggatatcctcatcttatgccggttatagaaaacaaaagtggtggtagcatcagttccgagcatatgatccgtcgtttgtggtatccgcctacagaatatactgaaaatctttcgaatatcaatttggcgataggtatgttaggaggtcctgacaatgggggaacgagattgtggtgggataagaaatcttatctcaattgacgagagagtttgaatacgaataaaagaatgaaaaagaatttatatgaaaacaataatatataaacaattcatttatagtcttctgtttttaacggcttttttattgcctgttgcttgtgatgactggaatgaacctgaaattgtagatattgatattaatagtgcgaaagaacagaatccggaactatgggcgcgttatatgcaggcattacgtacctacaaacaaagtaaacattacttgtcatatgcgcactttgataattctccggaaaaatcgctaaatgaaggtagttatcttcgggcattgccggattcgttggatattgtgaccttgggtaattctcaccaaatctctgattatgatcgggaggatatccctttattgcaggaaaagagtatccgggtgctttatttgatagattatgtagctcacgcctcttccttaacagatatcacggcattaaatagttggttggataaagaaattgctacgtcggccgaactcaatctggacggatttgcttttaccggtcttccgctctataatggaactgatgctgaattggcatcgtataaagagaaatcacggctgattgtttctaaattatctactgctacgggacaggataaattattggtattggaaggaaatccggctttcgttgatgaagcagactttgacaaattgaattatattgtgttgaatactgcagagttgaccaatgtaaccgatttgaaattgcaggtgacggggattcttgccaatagtttattgtctaaagataaattattgttatctgttcaaatgggcggacaagtaattgatgagactggtgtaaaacaagaggctgtaactttaatgactgaccgtgtggttgctcttggtccattagctggattgggaatttatgctataggcaatgattattatagcccgataaggaattacgagattacacgaacggctattcaactaatgaacccatcgaaataaaaaagaattaatatgaaaaagaatcttatcatacattttatattagtattgttactgaaaataggagtaacagggtgtaccgaagagactatctcaatgaatgcggacagaatgcctgacgagacggctatggataatattgcaggtgccctgcgtaacacaactacattgactaataaagcatttattgagttgacggaaggggacgaatctgccacagaggaaatattctattcactgtcacaatcagccggaagcaggttgactgtcacagccgttgtaaacgagaagcttgtagaagattataatgaggaaaacaattccaaattgaatacattgccggctgggaatgtgcagttcgaaaatggcggagttctttcaatagatgctggagaacaaaaatctgccaaaatcaaatttactatatccacagccggactgaatactgatactccatatcttttgccattaactatggaagaaatacctacaggagtaaaggtggatactaagaaacaggtgctttattatattgtaaatattcggaaaagaataacgacttgttatcctaataaccagtatgaacaaatagatatgccgccaatgcgacctgatgcatttgttgttttctatgtgaatacttcaacttatcaaccgttgatagctgatgtttatggaattcaaaaaattaatcagatagattatactcaagctttacataatataggtagtatcgtgaatctacgaattgtgacaatggactatgagtctgcaacaggacgtgcactgctcaatttgagtagtgacatacgtgatgtgttggaaaaggcggataagtttattcgtccgcttcaggaacacggacgtaaagtatgtcttagcattgaaaatggtaataaagggtttggcttttgtaatttaaacgatatgcagcttgcagattttgttcaacaggtgaaaaatgtggtagaactttatcgtttggatggaataaatctctgggacaaagtgagtacttataacaaggaaggtatgtttgctatgaatacagtctcttatcctaaactaataaaagcattgcgggatgcacttcctgaaaagttgctgacagttgttgataagggagaagctactgaatatttttatgatgtaaatcgatgtggcggcattgaggtaggtaagtatatagactatgcgtggcatgcgtatgatagtggaaaagaagtggtacagattatagaaccatgggacgcagagcatccttatagtgaatatactcgtaaacctattatagggctggcaccggaatgttatggaagtttggttattccattatatgaaaaaggagaaaatcctttgagagataaatcgcaatataggatggtggattggaaaatgaataagcgtaaaaaaaataatattgttgtatatgcgtttgatcttacagccaatgagcaaaatatgtatgaaggaatggtgaacgatatcgcgataggagatggcattaacgctatgatggatgatggtgcttattgggggcaatccatctatcctccttatgattggggatttatttccggtgagtattcttatacttataaaccgttggactggcttttgcgccagatgtataatgtgtattcaaaaggatgggtacgtccgtccggaatgtgagaaataaaatgaatcttaaaactaaagatataatgagtctgataattcaaaacaagaatataatgaaaataagtaataattgtttggtcatggttttcctgttattaataacaggttgtgacaacaaagattatactaaggaatctccttttggtaatagtgtatatattgatgcggcgaaagtgaaggatatagctaattttacatttaataatcttaaacaggatggacagcaacagatttctgctgtattggcatatcctgctgagcaggatatagatgtcagctttcggacagatccttcattgataagttattataatgcacgtttagggaataattatgcaatgttggatgctaagtattataagttctccacccagcatgttgtcattcctaagggaagtgtagattcggaaatggtaactattgaattttccaacctgatagacttggatattgacactagctttctattacctgttactattggagaagcatcaggagggatgagcatattgggcggatctaaaaatatctgttacatagtgcgtcgttccagtgctataactactgctgtcagtcttgctaacaattattttgagataccgggatttgttgccggtagtcctactgctaatgtagtaaacggattgaagcaacttactttcgaagctgttgttcgagtgaatagatttgatcctcttactgaaatctcatccattatgggcattgagcaatattgtttgttacgttttggtgattctggctttcctagacagcaattgcaatttgcggttaatgaaatgaaatttccaaatgccaatgatggtaaactgttgcaacctggtgagtggtatcatgttgccgttacttatgacacggagacaaaggctgctattatgtatgtagatggtaaagagcagagccgcattgacgattacggaaatggggaagccataaaccttggaaaacagaagaaaggagactttatgtttaagataggacactcttatggagaccccgacgatatgagtcggcaattaaatggagagatttgtgaagtacgtatatggaatgtgctccgttcacaagaagaaatttacaggaatatgtatgatgttgatccccaaactactggtttgaaagcttactggaagttcaacgaaggtaaaggaaataacattgcaaaagacttgaccggtaatggaaatgatgctgtggcttatacaactgctatatggccggaggggattgaagtaccgcagaaaaataaagagtagctttcgggaataatatcttgaaatgaaattagtgcaaataaatcacctttgttacattgtgtttcaaaggtgatttttctgtttagattcaattctttaaaatatcagtcattttatcttaggcgatatataatgtgcatttgctataagaataatgcttggtgctttggttttctcggattttatgttcacctttgtattgcattacaatatttaagtcgtttatatgtcttaggagatccttagttgtcgtcagttgcaggtatatatatactttgcagttaatgatagtacggctctgtgttcctcgtgtggtaggttaattaccccactcatatcctaggctgcggctaatagatttgtaatgcagcgggggatcagggtcgtatctttttattgagatttttatatatcattctgtattattttataataaaacattgattttattggctttataaggaaatagtcttatctttgtagggcattacatgtctattttgccgactggaagccaaggagcctttagtcgtaaacgactacgaacatattaaaaatatgttcgtagtttcgcgatattacggttctgtccccgtgtggagggttaatgcccccactgtatcctaggcttcggcatagatatgtaatgcaacgggtcggcaggaccgtattttttatattgatttagaacttgactctgtaaagaccctgtaaatgaccctgtaaatgggaaaatttagcaatataaatattattttatgtatcgcttatcgtattgattgagtaatgaaacgtgcgatatagtttagtgattatgcaaagtacaattctcaaagttatgttttgacgttcgggataaaactctttttcctcttactgaactatctgaatttttcagatagttgcatcttcttgtatttcttctgattcgtaataatggaagcctttttatctttttgtatattaatctgaatattgatttgggtaagagagtgtacgttaaatataattatggtttgagatggttattctaatgtaaatgtaatacttcacttaacttatctccaataattttcttctcattactaccaatagtagacaatctcaccaatgaaattccgtacaactctaaaatacgatcctttttaatatcacgttctgattgacttgtgcccgatttatggaatgtataaccatccgtctcaatagccaataccggttgtttactcacacgattataaattagaaaatcaatatgagtatttatatttgcagcatatttgctttccttttcattcaatagagaataatcctgaatcaacatatagagtggtaaatggcaaatggtattcaaatgacgcatattgatattctctttcagaatatcttcaagtaaggcgaatgtaagattctcggaatcgtattcggatattttcttgtgtttcttcaaataggcaattcgggcatctgtatattgctcatatagataatcgaatatagaatgaatcttactggtggaaacaatgccattgttatattcgatataagcaatcaaatcgctgatattgcagtctttgggttgttcgtttcccgatacgactaaatagaattgtgacttagcccgcgaaacagcaacattgagcaggtttggatcgtcggaaaaggaagtgatgacatcgtcgacagtagtcatgatgatagcatccttttctcttccctgaaacttatggactgttacaacgtcaatatcctcttcaagtgcggattttactgcatctacttgtttgttatatggagctatgacgccaatttcatctgtttcataagatagattcggtagtactttctgccagtcaatgttagttatctcttaatttagcttctatctcttcaatggtaggcatggtaccttccactttttcgggatagaacttctccagatcatattcggaaatacccaaaggttggctgctcgactccaaagcatactgggcttgtatgcggtctttctctttgcaaatcagtaagccgatggttgggttatcccgtccttccttacgcagcaaatgattgcaagctaccacatatccacctaattgaccgatgtcggcaaaagcaaatttaccgatctttacctctaccactacatagcaggaaagcgaaagattataaaagagtaagtcgataaagttttccgtttcgcctatttctaaacgatattctttgcccacataagcgaaacccgtacccagttcaatcaggaatcgggtaatgttattcagtagagcatctttgagcaatcgttcattgtaacgcccagttatacccgtgaaagcaaaattgtaggggtctttggtcaactcctgtgcaaggtcgctcatcgcatcaggcaatgtttttgtaaagttagtcagtgccttgccctgccgctcataaaggtcggtgctaatgaaattgagcagcatactacgactccagccattctccaccgtctggtgaacatagaacagagctttgtctatatcgtctttcactttatccattatcaagcaatggtgtctccatgggacttcaaatattccaccaacttggtggaataattccgtttcattttttccaccaaattggtggaaagttttcagagcatccttgtataacaaataaaacttcctacaatagtaaatattgctctttgacaaaccagccgcattgggtatagcttcacgtaaatctttgctcaatcgagtgataacactttcgccccagcgttcttctacgtgcaattcaacaatgtcacgacctaaaagccagttgaatttcaactgttccacatttactttcaccgctgcctttatttggctttgacgatagcgaccgcaaaggtctttcacccattgcagatattctttatcaagtatgtttattgacttgttcatcgtaatctataatacttcagttgcgttaatttttagttctcctgacatcagcttcgggagaagtgtgtcgcgtagaattgttaacctaatactttcctgttcatttcttagtatttggtcgaaatacggtttatttatctgcctatttttgtaaaacagatgattcttattgttatatgtattgtatcttatccgcattttaattaatgtatttacgatgagatagttttttgtcattgtgattaatgtttatttatgtactcactttaagttcttagaaacttttaatgaggttgatgcaaaagtagaaaataatttccatagtgctgtcgtactttaaatgagaagtaaatgtaggcattattattgatgtgattgttatagttggagtaaaatttattcttttggttgttagaatatgcagaaactcctattctaaaaaaatatgatttgcaatgaacattctaatgcaagtttaatacttcacttaacttatctccaattactttcttctcattactaccaatagtagacaatctcactaacggaattccgtacaactctaaaatatgattctttttaatatcacgttctgactgactcgtccccgatttgtggaatgtataaccatctgtttcaatagccaataccggttgtttgctcacacgattataaattagaaaatcgatatgagtatttatatttgcagcatatttgctttcctcttcattcaatagagaataatcctgaatcaacatatagagtggtaaatggcaaatgatattcaaatgacgcatattgatattctctttcagaatatcttcaagtaatgcaaatgtaagattctcggaatcgtattcggatattttcttgtgtttcttcaaataggcaattcgggcatctgtatattgctcatatagataatcgaatatagaatgaatcttactggtggaaacaatgccattgttatattcgatataagcaatcaaatcgctgatattgcagtctttgggttgttcgtttcccgatacgactaaatagaattgtgacttagcccgcgaaacagcaacattgagcaggttgggatcgtcggaaaaggaagtgatgacatcgtcgacagtggtcataatgatagcatccttttctcttccctgaaatttatggactgttgcaacatcaatatcctcttcaagtgcggattttactgcatctacttgtttgttatatggagctatgacgccaatttcatctgtttcataagatagattcggtagtacttcctctttgataacatctatttcccgttgattcatgtgactgcgggagtgattacctttggctgtccgtatggcacaaatgacatcctcttctcctttatcacgtgtcatgatgacaagatctccaccataaaatttctgattacagaagttgataattcggggatggcatcgataatgttcccgtaacaaggtctgcggtatattcggaataactttgcagatggattgcaaaaaactcatattggcacaatcatattccggcttaatcaggcacgcattagcgataaagtttagcttttccttattttcttccgtgaccacattgggaagttgcatggtgtcaccgacaatgattgcatttttagcacatgacaaggctaaagctccggtctcaacggaaacctgtgatgcttcgtccataatgatataatcatatacggcatctcgttgcagactgcttaatgatgaaaaggtcgtacttaagataatagggtattctttctgtacctctcgccaattattttttagatcagggagcgtaaagataggcttgtcatgattattgccataggtatgaaataactgattctttagatatttcattgatgtatcggccatttgtctagccatttctgctgcatctttgttggcaagttccttttctaatgtgtctatttcaacttccagttctgcatactttgtttggtagaataagatttggaagtcggcgataatcaaactcatctcccgtttataaaaacctttatcggggattttacaaatcgctttgctcctgaatttaaagaagaaccatttcaaccgttgaataaaagctgctattccccgaagacttgatgattgttctttttctgcaaattgttgacattcattccataaattcagaaggtctgccgaactggaatttttccgttgttggaaagtaaattcttttgttccgaactcttgctgataatgttgccactctatttttaaagcttgtatttcctgtcttgccatggcaaggcgttcctgtttggaaaatatgctttttagttcttctgtctgatgatgtatctgatcgagaaattgaggttggtcggcatccacatcatgccatgactcaaagtgctccggatattgtttttcctcttcttgagtctcgatgaatttctctttgttagctgtgctgccaagcaatgcaacaatgaatcccatatcgtatttggataacttctcaagtacattgacgatggcggagttattattagatactacctgaacagtcttaccacgcacaaggatattggcaatgatgttcagaatcgtttgggtctttccggttcctggaggtccttgcacaacactgatttgattctcaaaagctgcctggactgctttttgctggcttgcattacaaccgaaaggaaaaatcaaggttgaggcaggctgggtctgcattttatatttttgaggattcagatatacagcaatagctctgttgtttgcgatgaaatgaatcttttcatattgttttgccaatagcttcgttccgtcatcagctttcaattcgttcgcatcggcaactttcttcaaatattcgaatatacttttcgaacgactctctcccaagcatgattcgataatttctaagtccttttctctgtaatcatactctttaccattcagaaaacgaatgtgccaatagttgtgtgatccggccttaaaaatagataaggctttgatgtttgataaagttctccctttactgattatttgataattattggggtccggtttgtccggatcagtcagccaaaggacattttcttctttgtaagtatacgcactgggaacattccggaatactaccttatagttgccattatgattttggcaactttctatttcaggagtcttgatttgaccttttataataatcagattttcggaagtatctatcataggcttgtgtgtaaatataataagtcatgctgctgtttttatttattatttaggatataaaagtaagaatattttccagaatatcaaagctgaagtagaaaaaacagtgaatgactttattcagctttgtattgttataaatatagagtgagattcggtttgggagtattgaacgtgataaaagagatttgttttgccaatgaaatcattatctttgcaaggtatatattaatgaacgaggaggatattatgcttgcatacacatatattgaacacggaaagtttgaattgcaggagaaagcaagaccggaaataaaggattcacgggatgcagtcgtgcgtgtaacacttggtagcatctgcaccagtgatcttcatattaaacatggcagtgtgccgcgtgctgtgcccggaataactgtcgggcatgagatggtaggtgtggtagaacaagtaggggctgatgtcacttcggtgaagcctggtgacagggtgactgtgaatgtcgaaactttctgcggtgagtgttttttctgtaagcatggatatgtgaataactgtactgatcctaatggcggttgggctttaggttgtcgaattgatggcggtcaggcggaatatgtcagagttccttatgcggatcaaggtttgaatcgtattccggatacagtgagtgatgaacaagctttgtttgtcggtgatgtgcttgcaacaggtttttgggcagcatgcatctcggaaataaccgcggaagatactgttcttatcatcggtgccggacctaccgggatttgtactttgttgtgtgtgatgctgaagaagccaaaacgcattattatctgtgagaagtctcctgaaagaattcggtttgtccgcgagcattatcctgatgtgttggtgactgaaccggaaaactgcaaggattttgttctcaagaacagtgaccatggtggtgcagatgtcgttttggaagtggcagggagtgacgattccttccatttggcttgggattgtgcccgtcctaatgctattgtcacgattgtagccctctatgataaaccacaacttctttctttacctgatatgtatggcaagaatttggtttttaaaacaggtggagtggatggctgcgattgtaacgagattctcatgctgattgaggaaggtaaaattgatactactcctcttattacacatcgatttccgttgaatgagattgaggaggcctatcgtatctttgaaaacaaattagatggagttattaaagtagctatatcaggaaataaataaaaatagaatttgtgtatgaagaatatacttatagtaagtaataatgatatgtgccgcagtcgtatggcacaggaaattttgaactccttcggtagagggatgaagattagtactgccggtattttggctggaaattctgtccctgacgttgtttgccaagtgatggaacaaaatggatatgacttttcgcgtagaaagccctgtgatgttgcgacgtatgcccaacagacgtgggattatgtcattaccctttgtccggaagcagaggaagtgcaaaaggaaatacagggtgtagtgagaaaatacgtttctttcaactttacagatccctttcagggaggaattcatgtagaagatgagcaggaagaacgggttagggcactatatgacatcatgcataaagaactgtatgagttctttcgaagtgaattgatggaaaagttgttacctcgctgttcctgtggcgcaaatacgtattgtaggtgtgagtaggaatataagtaaaatcatatatgtacatcatccggtgatggtggcagatctgtgtcattttgaacgcgaagttgccagaaagcaatagcggatgcggcggctacattgagagaatcgacaccgtttgccataggaatgcggactacatagtccgcctcattgattgtttcgttttgaagaccatccccctctgttcccattacgatggctaacttgggttcggttgctaagataggattatcgatagagattgatttctccgtgagtgccatagcgactgtacggaaaccctgtttacgcaactcattgggagaaccgtccaaccaagtccatggtatcaggaagacagaacccatcgaaaccctgactgcacgtcggtttaacggatcacaagaattgcgtgttaataatatagcatctattcccaaggcggctgcggaacggaagatggctccgatattagtagcgtctaccacgccctcaatgactacgatccgtcgagctttccgacacacctcctctacacttggtagtgcccgacgacgcatggcacagaggacaccgcgcgtcagtgtatatccggtcaatgtggcaagtaactttctttcaccggtatagacaggtatatcaccacaacgttcaatgatgccagccgcatcaccagtgatatgcttctgttcacacaagagggctaaaggctcataaccagcattcagagctacatggataactttggggctttctgcaataagcaatcccttatcaggctcgatacgattccgtaattgagcttcggtgagggtactgaatatttctactccagagtctgttaaggatgatatttctataatgggcatagtgatttctttaaacgatctattttattgcagcaatgatagtatgcgcttcttacttaccaatgcagcatattatgctaattgattatcagtagtttatggcttaaaagatagactgctcaaaaaattacttgttttttcgtcaaaaatcgaagatttaacacttttcttcgttgccagtctcaaaacagagggaaaatggggaaaatcgctctctttcgcctcgaaacctccgcttcgcaaagataaggtatatcggggattatttcgccggttcaggctgcaaaatggaagacagattcacagatttccgggttgttttcttgtgacctggtaggaggtgagtattgctttgcttggagttgtattttgctcaatcttcatacttagattgctcatattttgcagccaaaagagaaagtctataggtctggttcggcttggtttgggcgaagctatctctttttctcccctttgttagctttactttaatgaacgtatatatgaatacggagataaagtaaagttggtttcgataatttatgctgtgattcgcttgaaaaaatgttgtgtaatagggatgattcgttggaaaaagtgtaactaaattcgatttattcgcttgaaaaaatgtatttaaccttggtttattcgctcgaaaaagtgtaattttgtagcggaaagaataagattgcgttatgcttaaaaggaaaatagaaacatatttagctaattggaaagaggccgagggcagaaagccccttgtgataaaaggtattcgccagtgcgggaaggcatatattgtccagaaattcgcaagggagaattatgaaagtgtggtctatatgaacttcattcttgaacctgacaagaagtctgcctttactggcaatatagatgtcgataccatcattctcaacctctctgctttgattcaaggcagtcggttcattgaagggaaaacctgcattatccttgacgagattcaggaatgtaaggaagcaaggacagccttgaagtcattttatatagacggacgttttgatgttattgccacaggttctcttttaggagtgaaaggctatggtcaaagcaagaaaaagaaagaggatgtcgggcaagattctgttcctgtcggatatgaaaccgtaattgatatgtacccattggattttgaggaatttctatgggcaaacggaatcggtgaggctgttatcgattctgtcaaatcatgttttgagaacgaaaaggctgttcccgatgggattcacaaggcaatgatggagctgctatacagatatgttattgtaggagggctgccggaagtggtgaattgcttccttgaaaccaagaatatcgaactcatatataagaagcagcgtaatcttattgccggatacgaagaggatatggttaaatatgcagatgatgcggacaaatctaatatccgtgaatgttttgaatccattccgaagcaattagccaaggagaataagaaattccaatattccatagtcaaaaagggaggaaggtcttctcaatacatcggtagcattcaatggttggaggatgccggaatagtccgtaggtgctataacacgcagattacggaactgccgttggagggcaattccatcaaagattgtttcaaagtgtacactactgacataggtgtccttgtagcaatgctcgactatggcactcaggctgatatattgaaggggaatcttcttggatataagggagctatctttgagaacctcatggcggatttcctgtgtaagtccggacagaagctatactatttccataaggacagtgggcttgaactggacttcttggtaaggttcaaaggcgaatgcgtcatccttgaagtcaaggctaagaccggtaaggcaaaaagtatggctaccattcttaaaaataaggatgtgtatcatgtcaagaatgcaatcaagttggggcaatataatgtaggacgtgagggagatatactcaccattccgttgtatatgggattccttgtcgaagacaggcttgcggacgttatcattcctgatgttgatgtgagtctgttgactactatttaaaaattttgattatggcaaaacagatattagttggaattgaagaacagaatttgaatgaggtggctcactatctggtgatatacttcccatacaatgaggaaatgtgtagctatacagatgattggcttggtgagctatatgaaaacaagtatcctttggtttctaaagggatgtggtctggcataattgacttgaaagttcataaacttcttgattggaaaccagaatatggaactttatatcttcaagctaaggtatgtgatagcggaacctatttcttgcttgataaagataaaaaggtaatatgtaaaattaccgattatgtacctaatggcttaattccggaggcggatgattgtggggattatatccgtttaagaatcaaacatgacggtatgatagaaaattggatggagaagccagacttttccgactttattaaagatgctgatgctgttaagaaaattgatacgagcatagaagaagaaccaatactcgacactaaagtagagttcacttatagccatcttatggcaaaactgcttcgtcttccgaaatacctacaattggaaatagggaaggcactgatagcaaatgcatcagaaggttttgaggaagaggatgatgaagattctctctaatcagatggaagattaagaatgatatacagctgcaataatttgattattaaaagtataattctatggatatattaagtctcaccaaagtaacatcatcgttcatcctaactttaatagaaagagacgatggacaaaagaaacaaattttggagacgccaacaaatggctcgtgtgtttaaggctcgcatgattctttatgccgcttatggtcattgcatcattcgtgaggatggaagctattatgagcatccccgttggtttgaattggcaaaagagaaatgggcacaagtttacaaaacaacaggtactccgtgtagctgttggatgtgcaggggattcgaatatgaccgcaaggagtataagaaagagactcggcggattattcgggaatcaatggagtgagctaaatgataaggaactgaatctgtgtattaattgcataggttcagtttttattatgcggcatataggcaaaaggttacgtggattttctcagaaagcgatgtgtgatatggaatttatttgctaattttgcgctgagtttgaaacgatataaaaactaacaatgcaaagaaatagcatgaacatattatcgaaggtcacaatttggggtaacaaacgccctgaatctgtactgtgtgttcatgtctttggcattgaaccttgtattataaatactttccaacgaagaacatagcatggtgtagtttattctacccctgattgaaaatataaactgaatagttggagagtctttaccgaactttccaactattttgtttttatacccatttgtgacagttatcttacgatgcttttctgtcatttccgtctgatgggtgattgacaaacagattattaacgtgcagcgatgcacataaattgagaagaaatgaattataaatttgatggcagtaaggtattttttacatctgatacccacttttatcacggaaatatcattcgtttctgcaacagaccttttgaggatgtggaaatgatgaatgaaacgattatctccaattggaataatacagttggcttggatgatactgtttttcacttgggtgatttctgtctgggcggttcagctgaatggactaaaattcttgatagattgaatggcaagatatatctgattctcggcaaccatgatttaaagaacttgaggcaggggtatgtcgataggtttgagcatgtgaccatgcagatgcatatagaagtggataaacagaagatatatttgaatcactatccgtttctgtgctttgatggcggctataaagatgtatggcaactgttcggccatgtgcatacgaggaagaataacactggaattgatgcagcccggcttcagtatctctatcctacacaatatgacgtaggtgttgataacaacaactttatgccggtttcatttgcacagatgaagataattattgaaaaacaagttgaacaattaaaaatgaaagagcaatgaagatacaatacatgagcgatttacatctggagttcagggagaacagcagatatttaaagcataatgaattacctgttaccggtgacgtgctggttttggctggagatatattctatcttagggatagaatagctcctatgatgaaattctggaaatgggcttcggataattacaggcaggttctgattgttcccggcaatcacgaatactataattattcggacgtgatggaacgagggctacaatggaagtggatgttccgtgagaatgtagggttctatcagaatcaggtaatccgtatcgatgataccgattttgtcctgagtacgctatggtcacggattaacccgaatgacgagtatttcgtgtggaaaggtatgaatgactttcgccaaatcaaatttgacggaaaattgctacaggtagaggaattcaatcggatgcatgagacctgtattgattttatccggaaaagtgtcgaagagagcacggctggtcatattgtggtggttactcatcatttgcctactttggaggtgattgatccacagcacaagaactccgtactgaatagtgcatttgctagcgaatatggtgattggattgccaacagtcggatagatatttggatttatggacattcacataccaatatagacacagagattggtagtacaaaagtaatctgtaatcagatgggatatatttttgcgaatgagcacattgtgaatgggtttgatccgaaaaagcatgttgaaatttaatgagcattaagcaatggatgaaagaataatagatagaaaactctttattgatttggcaaatgaggttggcttgaacgcttcgcatatagaagcaatgggtgaaatgcgtcattgtgaaatcacagttagcggcaatatgctggaacgtctagttgaaattcagcatcagttcgagcaacttaccgtaatgggggatgatgaataccgtggcttctacattgtggtaccgcgacccactccagaggaatggggtgatgtcgaggaactgattgcttcgggagagtatcaaagcaaagaagccttccttgcggactggcttgcgttcaatccaacggaaacgcagtggtttcatgttacctcttataaatacgaagagttccggtcgattcgcattacagaccgaaaacatgcgcatttcgtcataacaaatcgctcctcttgtgccgacggagaatcagatgacggatggtatcaggattcccttgcccgacttttctgctatttgcagaggctggttgatgttattgttgcaaatcctgatgggttcaacgactatgtggcgcacaatctgccgtgccagcaacggattgggcggattgcacgaaaggaactcaataggatagctccgagctttaagattaatgtggaagatcgggaaacagcgataaaggctttggaggattctgcgaaggaacattccgcacttcatctgaagactatgaccattcggcaatattgcacatattatcgtatcgctaacgaggcttatgaggcatactaccggaagcgaagtattggaaaccgtctctacgaagaacaaccgaatatcccggaagaactgcgagatgtagtctattacaaacgagtgaaattcgtagatgtagataaactctatgacattgacagcccggaggattttatacggtttgcaacagaccactatggcgagttggggttttcgcgcttgaacatcattgcatcgaaggtgccacagcagggttggatgatagttgtttctaatagctactcggcaaatgtcgagctggccattgaggttgccactgctctatataaggtcggagtgccattattgattcgtgatgccgagaaacttttgaggattctgcgcgaagaagattatgtgcggttaattcctaatacgtaccataactatatgggttatcaggaagaaggtactgtttacgaactgccgtgggaatacgaatgctcagacgatagtgaatcggatttgactttggagcaatacaatgcgattgtttctcttgcggaatggcaggatgaagaattggtgaagcccatcgagtgatgcttaaattgaagaagctggcttttatcttggaaataatcatagataaaggtagaagtctgcttctttgaaatctctattttggtagcaaaatcagtatttaatagtcgtatcttttgaatttgtgatttttgcgtccgcaatacatcattaaatagatataaagtagtatctttgcatattatatgatgagttaatatgacaaagaatacaatgggaaccaagttgccccgaaagttggagcagaaaatgtcagttgtgggagagcagattaaactggctcgcttgcgcaggaatttgagcgtagctcaggtggcagaacgtgccacctgttctccgttgactgtgtcccgaatagagaaaggtgcgccgactgtggcaatcggaatttatttgcgagtgctctatgctctgcaactggacgatgatattctgtggctagccaaagaagataaattgggaaaagccttgcaggatttgagtttgaagacaagggaacgtgcctcaaaaaaggagtaaacgatgaagatgttatatgtttatgccgattttgactggctcaacgagacagaactcgttggcgagttaggctatgaatctcttcgtggctcggacagctattgctttaccttcagcgatgaatggctgaagaaacacggagatttatttctgagtgatgacctcaataattatccgggacagcaatatacgcaaccggagaaagatatattcggatgtttctcggatgctttgccggatcgttggggacgaacgctgttgttgcgacgtgagcagattgctgcgatggaagaggggcgaccggtacggagactatcttctttcgattttttgactggtatcgatgacttttcccgaatgggtgctttccgtttcaaggagttaaaagacggaggatttataaatgtaagtgagttgttgaaaatcccacctctggcggatataagggagttgattgcggccagtgcggaaattgagaaaagtgaagaggggaatgtcctgcctgacaggaaatgggttgcccaactcgtgcagcccggttcttcattgggaggtgcaagacctaaagccagtgtgatagacacggataaaacgctttatatagccaagttcccttctcgcaaggatgattatgatgccggactttgggagcatttcagtcaccttcttgctgcaaaagccggtataaatgccgcaaagaccaaagtgctggcaacaggaaagaaatatcacacgttgctttctcaacgcttcgacagaacccaagaggggaaacggattcactttgcttctgcaatgactttattgggactcaatgacggtgacaatgcaactacagggcatggttatctggatatagtcgatttcataatccagaactgcacgaatgtggaagagaatctgcaggaactctatcgccgtgtggctttcaatatctgcattggtaatagcgatgatcatttccgtaatcatggttttcttttgactgcaaaaggttggacgctttctcctgcatatgacatgaaccctactttgaatgagtatcagagtctgcttgtctcatcaacctccaataaggcagaactgggtattttgctggatgcttgcgaagactatatgctaaaccgtacaacagcagaaaagattgttgttgaggtaactgaagctataaaaggatggcgagaattggcaacacgattggggatttccaagagagagatggatatgtttgccggagtgttggatgagcgatgtaagatggagtagtttcagttagatgagtttataattgtaataatgattttgcataacaataatttaacattgtaaaaagattaaaaaaatgaaacatatatctgttcgagtaccttggcacgacaatggttggaattcgcatgtatgtgcaaatcctcgttgtaatacattctgtaaacaactacctaatattgtcaactcaaaagtagattgtgagcagttgtcgtgtggaatcgactggtctaaattaactacaaaagaacgtcctgcttgtgctggagagaatgggggattcatgaattacaaggcttatgagcgtgaatttattcacatatatgcttggaattcagacaatccacattctaagttattacctacaaaagtaatgataccagcttattcagctcttggaataccattccgttacttgaatatggatgcacagaaagaccttagcaaggagcatcctgaatttcgccctgccgaaagtgcacctttcggttcggcttgggtttataatcctgagcgattgtatgatgtgcttaaatggttcagctcagagataaccgaggaatcgatatgcgtcttttattgtaagaaaggcaatccgattgacgatgaaggtttacgaatgattgtgggaatgggggatatagtaaaaaattgtggtgttcaagactacgaaacaactgccgattatacatatcccttatgggagataatgttctctcattccattcgcccagacctgaaagaatctcgcggcttcattctcccctataaagaatatctggagttggatgagaatatattccaagggaagggtctgtcaaagatacaggctcttgatgagatcaaattatcgctggataaatttgacagtagcggaaagatatttgatgaactatcatatggttgtgattttataagcaatcattcaatgctattgattcttgaagctgctcggcgttcgttggaggcagtaattcgacatggcttggctggctcaatcgagggatggcaatgtcaactcaggtggattgatgcccgtattgagcatgtcaagaaacaaatcactcccttcccttcattcgcttcagcacttaaagcgctgggaatagattatggcaatctgattgaaagcgacctgcgaaaaaaaggatgtggaccgaaagacaatccctgggggcattttgaaaagttgctaaataaggaaatcaaagttgatagtgctgtttacaactcgtctcttcctacgtatcgaataagttgggagggccaaacaagtaatgtacgtgagcgtcttatcactttatccagatttgaacttgaatccgatgttattgagcattttatagatgatgtagagtctgatatactaagcaatccatacctcatcagcgaatggtgcgctcggaattttatagagaaagtttcaacgcgtacaattgatcttggagccttccccgacccaacaattcagggtgataatgttccagtgcctccgttcgcagcggagtccattttggatactcgacgccttagatcattagtcgttgaaaggctttattccgttctaacagatggtgatacccttgtgtcaataaaagagatggaggactatctgcgcgacataatgacggaagaagacaaagctcgcctcccgaaaaacatacttctcacacatcgccagttttttgaagtatccttcgattatgttcctgatgagaaccctactgctatccaactcaaggaatattatcaaatggaggagtttcttcggaaagtgctacgagaaagagcaaagagagatgttaagaagcctaccggtgaggactggctatccctcgctatgtcagacaagaattatgatcctacaaacgagcgcagtcaacaggctactgagcagcaggccaaagctcttgaaatgatggacaaaaagcgcctttcagttctcacgggaggcgcaggtaccggtaagactaccgtagtgagatcctttctctgttctgacaagataaaagcagaaggcgttctgctgctggctcccactggaaaggcgagagtaaggctcagtaatatggccgaaaatgtgagttcaaaaaccgtagctcagtttcttgccagtctcggcgccttcgattttgaaaacatgaaaccgcgtctaactgaagactcgcgcaaatactcacgtgctaagaatataatcattgatgaatgttcgatgctaactaccgacacgtttcatgcgcttattatgtcgcttgacctgaagttcataaaccgaataatacttatcggagacccctatcagctacctccgataggtccgggcagggctttctcggatttatgccattatcttaattgtgatgacgcggacgccaatctgaaatctgccattacctatctccgcaccgttgtgcgcacaatagccagtggagattcagatgtcttgactttggcctcttggttcagtggaaacaaaccggagaaatttgccgatgaaatattttggaaaatcgaaagcaagaatctcaaaggcgatctttcagtttattactggaacgatgaaaaggatctgcctcaaatccttagggatgcaatttgcaaggaactcgcttgttccgatgtcgaactgccagaatccttgaagcaaaaaataggtattgacgacttaaaatcgcttgagtcagatccggcagcgctcgaaaatcttcagattcttgctccagtaataaatcccgcatggggtacatatcaactgaattcctatcttcagtcatgggttggaaataatatcaatcgcaaaggggattatcaggaaatcggaacccagaagatatataagaatgataaagtcattcaacttcaaaatatattacgagaatcctatccatcaaaagaaaaatatcctctctccaatggccagataggctttgttaagtctataaataaaggacatatcaatgttatgtatgttggcatacctcatgaaaccttcggcttcaggggagataaaggggaagaccaggatgctgctattgagcttgcatacgctattacaatccataaaagtcagggcagcgattttgatacggtttttgtggtattgcccaaaaccggccgcattttaagtcgtgagttgatatatacagctcttaccagagcaaagaagcgtgtagtcctgcttgttcaagattctattggttggttgagagaatttactaaaccacaagcctcagtgctcgcgcgacgaaataccaatctatttgactattccgttcgagccgaacgtcttaatattccttatgttgagggcctgattcatggaacagccaagaaaggtctgtttgtgcgtagcaagtcagaagttgtaattgtaaaccaattggtaaatgctggggtggaatttgagtacgagcaactactggaagaaaatggccaccgatgcattcccgacttttcctttgaaaccccatggggtgatagaatcatctgggaacatctgggaatgcttgtcgttccggaatacaaggcttcatgggagcgtaaactaaaattctacgaggaaataggttataccctcggagaaaatcttttcacgacttgcgatcatgaaaatggtgcaataatgaccgaagaggtggaagacgtcatcagaaaaatcaaggagcagttatgaatcaggaggaggaattatatttcaaggtactcagtaaacaaggtcgggaggcttggacaatcttcaagaatcctatgtatcgtggagcattggaaatcgcccagaatctttataaagacaaagcacattttgtgtatgagttacttcataatgccgataaccaaggcgctacccatttctcaatgaggacaaaaagccggaacaagttgaatttgatgtgatggcagaatcgctcgataaaaagtatctgctggttgacgaatgcaaatggacaacccaagagaatggcaaacaactgacaggcgaacttctccgtaaagctaatttgttactatttatcctcaaatccgcaactacgcgcctaatatgatacagaagcgaaaagaatctgcatcgttagtaaaaagggggcacagtgcatcgaatgtcaccataaagacatataaatgccccttaccccaccatgcgacttgaggcaatacgcaaaatcacgactataagttgtcggtgttatccaaagtcattctggaacacattggcataagcattgttgcatgaatagatattcagcacatacttccttgatgtcctgacccatttggctggcacagagatgaacttaaagacaaacgtcttgatgcggcttgttgctttgagtccgaacctcttcacgtcaagcctcgccatgatgaatttatagaagttgcgtatgagtgccataagcagaagaaacaccgtgttttctcccataaaggattttggaagcctgttccagccgaatccgttattcatatcatcgaagatgcgttccttccctccacggaggttatagaattcgacaatctctttctcggaagactcgtagtcatttgtaaggatgcagcggtaggtgtattctccttcccacaggtcgagttcgccgtctatccgcttctgtctttgaatcacaagacggtatgccttccctttccatttctcgatgagaatggaggccagctcaaactcaatgccgcccaattccactttcttccaacctctgagggcaaagatgtcattgtagagcgaactgcatcggttagcacggatatagaaggtcttgcagtgtttagcaatctcttccactatctcttcagaacacgagccgcaatcagctctgaaacggttgataataagcttgttttgttcaaacctttcaaagaacctcttcagcgtgtccttctggtggaaacggacatttgtgttgccgtcgctgttctcaatgccgacaatcaagttgccaataaccgccacgccagggcgataaccaaggaacttcttgtatgtaggcttcgcatcaaacttctcagcctctatgaactggtggtcgaagtcaacgtcatacccctcgccctctttcagctgccctgtggacaataggcaattgaggagcagtgtattcagcttgtctgccgtgttgaagtcgtaggtcttgccagtgtcggatgtgtaggaaatgttatcctgggtcagttcctttatggctctaagaatcgtgtcggcactgcatgtgcgaagtgtcggatgaagcgaaaggtggtacatcagatgagtggtgacatcctcgatgcatgagccgccacaaaaataaacgctcataagcgaacggatgatttcgctgtattgataaccatacagcctgcatctcataccgagggttgagtcgattacagatgagagtctggagtcaaattgctccattattgaaaatattcctccaaaaggagtgagtttctcggatttaattgctacctttgccatgtctgtcgggtttgatacatattttgatttgcaacactaagataggtgaaaaatctgacatggcaaattcctgagcaactttttgttgctcaggtacttaaaaagttatatttgtaatagtgttgcggaattaaggtttatcaagaactacaccatcgttccggtgctgtttcttaagagtgctccgaaagatgatgctgggaatgcaatgttgccagaagatgttattgagttaatgaaataaaaggatataacaattcacgacttaaagatgctagattttagaaaacaatttcaggaaattatagagcaatcctatattccgttcaatatagataaagctgcaacttcagatgtatggagtaatatttacaaattgatacttcctaatattccagaaaaactttttagatatcgtaaaatagacgataaaggttatactattgaatcattaaaatccggaactatttcattatgccatgcaggaatgtttccggataagtatgattcatatttatatatagatcaagacaaaattcgcgaagatttaaaaaaggcattaaaggatgcattgcgcataacattgtcgcatataacccagaaatcctctgatataagggcagaaaaggcaacgcaaatatgttactacagagagtgtggatatacggatgaacaaattatagataaaatattgacagatgaatatatggatttttgtaacaacattgggtctgcgataaaaaagcaagagtcgcgttttagaaatccgagaaatagtgcaaaaatagcatgttttacagaaagtgtacagtcaaaatatatgtgggatagatatgctgatgggtataagggatttgcattagaatacgatcttagaaaatgtatttttaaatataactcattgggaatggatgtaaatctctttcctgtgatttatactgaattaagacctgacgttacattggatgagggaaatattcatacttacgagtattttaagcaagttggagataaaaattggttgaactttttgtcttccatgatatcagtcaatcaattatattggtatcgatcttatctttataaggaccaaaaagaatacgaacatgaacatgaatggagaatgctgtattataacttagaggatgagaataattatgcatcaattccagatgtcggatgtttgaatgcaatttattatggtccagatataatcccaaaggataaggatgaattacatctgattgcagttgaaaaaggactgaaagagtatgatgttgctcttgatgctggtagccgtagatatgatttaaggataacagcaattaaataggaatattctttgctcaaaaaaaatcaatcaacaacctgaaagttgtgtcatctcgattatttatactacctttgcctacagagtaaggcaaaggtattttttgatgtatacaatggctgaaaaacagatagacacggttttaggattggttgaaggaacggaggagaataaagacgaaaagtggatgtgtcattcgcaagctatcgctgcaactatgtcaaaccgaatggaggaacttggtatgacacaacgagcgttggccgagaagatgaattgcactcagcaatatgtctccaaggtgttgaaaggtcgcgagaatctgtcattagaaaccttgtgcaagatagaaaatgcattaggtatcagaatactgcaagccggaatagataagtaataacaccataacagggcgcaagaatatgtcaatacagagcgaagcggcgttggaagccggactgatagccacacttcggcaaatggactacgagtatgttcagattaccgaagaagataatctttatgccaatttcaagcggcagttggaaattcacaacaagaaacaactggcggaagttggccgtaactcatttacggatgaagagttcgagaagatattaatctatctggaaggtggtactcgctttgaaaaagcaaagaagcttcgcgacctatatcctcttgatacggctaacggacagcgcatttgggtagagtttcttaatcgtacccaatggtgtcagaacgaatttcaggtttcgagccaaattacggtggagggacgaaagaagtgtcgctatgatgtgacgattcttatcaatggtctccctttagttcagattgaattgaaacgtcggggagtagaactcaaacaggcatacaatcagattcaacgctatcataagacatcctttcatgggttgttcgattatattcagttgtttgtcatctccaatggtgtgaacactcgttatttcgccaataatcccaatggcggatataaatttacattcaactggacggatgcggcaaacctgccattcaatgaactggataagtttgctgtgtttttcttggaaaagtgtacgctcggtaagattatcggaaagtacatcgtattacatgaaggtgataaatgcttgatggtgttgcgcccataccagttctatgcagtagaaaagatattggatcgagtgcagaactccaatgataacggttatatttggcatacaacaggggcaggaaagactttgacttcattcaaaactgcgcaactcgtttcggagttagatgatgtagataaggtaatgttcgttgtcgaccgccatgaccttgatacacaaacacagtcggaatatgaagcctttgaaccgggagccgttgacggtacggacaatacggacgagttggtaaaacgtctgcatagcaactccaagattatcattaccactattcagaaactcaatgcagccgtaagcaagacatggtatagcagcaaaatagattcgatacgccattctcgtatcgtgatgatattcgatgagtgccatcgtagccatttcggggagagtcataagaagattatgcaattcttcgataatgcccagatattcggatttaccggaactccaatatttacagagaatgcagttgatggtcatacgaccaaagaggtgttcggcaactgcctgcatcgctatctgattaaggatgccattgctgatgagaatgttctcggttttcttgtggaatactatcatggcagtgaggaggtgcagaacggcagtaccaatcgcatgacggaaatagcccaattcatccttaataatttcaataagtcaacatttgacggagagttcgatgcgctgtttgccgtgcagtcagtgccgatgcttatccgttattacaagatattcaaggaactgaatcctaagattcgtataggtgcagtatttacctatgcagccaatggaagtcaggatgatgaactgacaggaatgggtacaggttcttatctgaatgacagtgcaggcgaagtcgatgagctgcaagccatcatggatgactataacgaaatgttcggcacatcgtttacgactgagaacttccgtgcatattacgatgacatcaacctgcgcatgaaaaagaagcgagccgatatgaagccgcttgatctttgccttgttgtcggaatgttccttaccggttttgacagcaagaaacttaatacgctctatgtagataagaacatggaataccacggcttgttgcaggcatttagccggacgaaccgtgtgctgaacgaaaagaaacgcttcggaaagattgtatgtttccgtgatttgaagagcaatgtggatgctgctatcaaattattcagtaacagcaacaatccggaagaaatagtgcgacctccgtttgaagaaatcaaacaggaatacaaggaacttgcatccgattttctgaagaaatacccggacacaaactgcatagaccttttgcagagcgaaacggctaagaaagagtttgttttggcatttcgtgatattatccgtaaacacgcagagattcaaatatatgaggattatagcgaagaagctgatgatctcggcatgacggaacagcagtttatggatttcaggagtaagtatcttgatatccatgatacttttgcactcgttgatccagcaccgtcacccaaaccggatgatgatacagatgttccggatgacggagacttcggtgatgtggatttctgccttgaactcctacatagcgacattatcaatgtggcatatatccttgaactcattgcagaacttgacccatatagtgccgattacgcagaacgccgtcagaatatcattgatacgatgattaaagacgcagaaatgcgcagcaaagccaaacttatcgatggtttcattcaaaagaatgtggatgacgataaggaaaacttcatgattcagcgagacaaagctgacggtacaagcgatttggaagaacggttgaaccactatattgccgttgagcgagaaaatgccgtcaactcattggctgaggaagaggaaatatcgtcatcggtattgaatcacttcctcaaagaatatgactacctgcaaaaagagcagccggaaatcatacaaaaagcattgaaagagaagcatctcggattgataaagacgagaaaggcgttgacgaggattttagacagattgcgtaatatcatacgcactttcagttgggattaaaagaaatactgatatggtaaagacaaatgaacccggatatgtgtatatcttgactaatccaagttttcgtgaggattgggtcaagatcggtaaaagtgcgcggcctgtagatatacgttccaaggaacttgacaacacggctgttccgttgccttttgagatttatgcaaccattcagacggtcaaatataacgatgttgaaaagcatgtacacaagactattgatcggttgacggatttgcgtattcgtcagaatcgggagtttttcaatgtgccgccacaaatagctttggatatattcaatgacatagccaagatgattgatgatgcggttgttacggtctatgtagataataaaccggtttgccataacgaaaaagattcattgcctgtcgtgcagaagcgaaccgtaaagcgaggtcgtttcaaattcagcatggtcggtattaaaataggggaatgcgttacctttattcctacggatacggaagtcaaggtggcaagcgatgattccgttgaatacgaaggtcgtatttataaattgtccccttttgtcggtacgtttatgccggaagagaaacggaatacatcgggtgcatatcaaggggcaaaatatttctcatataaagggaaagtgctagatgacctgagaagtataatagagagcaatataccattgccggaaagtgatgtaaacaagataatatagagcaataaagatatgagcgaagaactgcaacagaaactccgtgaccagctttgggaggtcgcaaaccgtttgcgtggcaatatgtcggcaagcgattttatgtattttaccttgggattcattttctacaaatacctgtcggagaagatagaaacatacgctaacagtgcgttggatgatgatgaagttacattcaaggaattatgggaaatgaccgattcggatgcaccggaattgcaggaagaggttaagaaccagtgcttggaaaatataggctacttcattgaaccgaagttcttgttttcgtccgtaattgaggctatcaagcggaaagaaaatgttcttcctatgttggaacgctcgttgaagcgtatagaagacagcactttgggacaggatagtgaagaggattttggcggattgttctcggacattgatttggcttcgcctaaattgggaaaaacagcagatgataaaaacacgctcgtcagcaatgtgcttcttgcattggacgatattgactttggtgtagaggcctcgcaagaaattgatattttgggcgatgcttacgaatatatgattagccagtttgcagccggcgcaggcaagaaagccggtgagttctatactccgcaagaggtcagccgcatattggcggagattgttactcttgggcataaccgtttgcgtaatgtttacgaccctacttgcggtagtggttcactattgctccgtgcagcaagtatcggtaaggcggcatatatctatggacaggagaaaaatccgactacttacaaccttgcccgaatgaatatgttgctgcacggtatccgattcagcagcttcaaaatagagaatggcgatacgcttgaatgggacgcattcgatgatatgcagttcgatgcagtggttgcaaatcctccgttctctgccgaatggagtgctgccgacaaattcaacaacgacgaccgtttcagtaaagcaggacgacttgcacctaagaaaacagccgactatgcttttattctgcatatggttcatcacctcaatgaaggtggtacgatggcttgcgttgctccgcacggagttctgtttcgagggaatgcagagggtgttatacgccgcttcctgatagagaagaaaaactatatcgatgctattatcggtttgccagccaatatattctatggtacaagtattccgacctgtattctcgtattgaagaaatgccgtaaggaagacgataatatcttgttcattgatgccagcaaagagtttgaaaaggtcaagacccagaacaaactccgccctcagcatatacagaagattgtagaaacctatcgtgaccgcaaggaaattgaaaagtacagtcatcttgctacgttgcaggaggttgccgaaaatgactataatttgaatattcctcgctatgtcgatacttttgaggaagaagagcctattgacatcaaagcagtcatggctgaaataaaggaattggaagccaagcgagccgaactggataaggaaatagaaggctatttgaaagaattgggactggttgaataattacactatggcagagatagacaacatccccgaaatgcgtccatcattcgacaatatacgccgtcaggatgagggcggaaacgaatactggagttctcgcgacctgtgcgctgctatgggctattcggcttattggaaattccaaagagtcatagacaaggctatcaaggtggcaggtgaaaaaggaatgaatgtagacgaccatttcaaccaagcggttgatatggtaaggattggaagcggctcattccgtaaggtcaatatcttccgtctttcgcgtatggcgtgtatgattgttgccgaaaatgccgatgcccaaaaagtgttggtacaacaagctcgcgattattttactcgaacaatttcgacaaacgaattgatgcaaaattcgttgagttctaacattttgctgtataaaacggcgcaaggcgaggcacgaatagaagtgatattcaacagtgaaacattttggatgtcacaaaagcgtatggccgatttgttcggggtggatgtacggactgtcaactatcatcttggtcagatttacgaaacaggcgagcttacaaaagaggcaactatccgaaaaattgggatagttcaatcagagggagaacgggatgtagaacgtacacctctgttctataatttggatgccattattgcggtaggttatcgtgtcaatagctatcaggccactcaattccgtatctgggctacatctgtattgaaggagtttattattaaaggatatgcccttgatgacgaacgcttgaagcagggaaaacactttggcaaagattattttgatgatttgctggagcgtattcgtgagatacgcacatcagagcgcagatactaccaaaagataacagacatctatgccgaatgcagtgccgattacgattcgaaatcggattgtaccaaattgttcttcaagatggtgcaaaatatgatgcacttggctgtaactcatcgtaccgctgccgaaatagtatatgaacgtgccgactcggaaatgccgcacatgggattgaccacttggaagaaagctcccgatggcagagtccagaagtctgatacgattgtggcaaagaactacttgtcagacaaagaggtttcagaactcaacggcataactaacgtatttcttgaatttgcagagcagcgtgcccaacgccatatcattacaacgatggccgaatggaagcagcgtcttgaacagtttcttgctacaatggactatcaagtacaagattcagctggtaaagtttctcaagaagaagcacgagagaaggcgtatggtgagtatgaaaaatataaagtgattcaagaccgttcgtttatctctgatttcgaccggtttaataatggcgacaaattgttgccgtttgatatcaatcccgataaagaataatgattatgacagataataacgaaaataaagtccttaatgttccccatttgagatttccggaatttagtggggagtgggaaatctatcctcttacagattttatgagtttcaaaaatggaatgaatcctgatgccaaaagatttgggcgtggaacaaaattcatttcggtgatggatattcttaataaccaattcatttgttatgataatatccgtgcctctgttgaagttgtggatggcgatattgaaacttatggtgtaaactacggcgatatcttatttcagcgcagctctgaaacgttagaagatgtaggtcaagccaatgtctatttggatagcaaacccgcagtgtttggtggttttgttattcgtggaaaaagtaaaagtaactattatcctatgttttttcgttatcttttggcttcaccaactgcacgaaaaaagataatcgtaaaaggagccggagcacagcactttaatataggtcaagatggattaagtaaagtttgtcttaatattccttcaattcaagaacaagagaaaatagcaaaactatttgaatgtatagatactcgaatcgctacccaaaacaaaatcattgaggatttgaagaaactaaagtctgcgattagtaaacatttgttcgcacgcaaagatttgttagaaactactatatgcttgtcgaatattgcgacattgaaaaatggttacgcattccagagtggcaagtataatgcactgggcaaatggaaaatcctcacaataacaaatgtgtctggcgagcgatatataaacgatgaagattacaattgcataatcaacttgccgaacgatatacaagaccaccaagttttaaaagaaggagatattttaatctctcttacgggtaatgttgggcgtgtttctctttgtaaggatggagactatttgctcaaccaacgagttggtttgttacaacttgcgaaaaatgtaaatcaagagtttctatatcaaattttatcttctcaaagatttgaaaatagtatgattgcttgtggtcaaggtgctgcccaaatgaatattggcaaaggggatgtagaaagctatgtattaccatattcctcgaatgtcaataacattcttttggtcgcaaaaatattacactcatacgatgagtacatcattaatgagcagcggaaactaacattgctaaccatgcagaagcaatatttccttgcccagatgtttatatgaacatctgttgcaatagatatagcttttgtttctgcatgacattctgtattctttcttcaatctcggcttttctttcaagcgatgacagaaaagttgagatttttatttgccactcaatttttggtactattattttgaacattgccaagtctttcttctgaatattgggtaagccagaacctatacgcagtttcattatggcatcctcattcgatttaagataatggtacaagtacatattatccaccttgtctgcaatgttttgaatggaataacaatgaccaccgctccaaaatggtgaggtgttgaattgtacatacccacaagagtttccgccctcacttattgaaatagtactggcttctacattgtaattgtcataatagccagatggctctgtaccaccattcattacataataattaccactatcagagagattttccccattgatttgtttacccttaacaatgtcacatagatcagacagtagaacagtaaaaccttttacgcttttgaaaagtctttctgaaatcgcagacctacaaactttacaatccttaatcaaaggactaagagtatgttgtatgcaaagagtttatggcaataacgtgtatttaagcgaaattgcacaaatatatcagccgcaaacaatatcttcaacagaattaacagaagatggttttcttgtatatggggcaaatgggattattggcaaatataaggattacaatcatgaaacggaacaaatttgtataacttgccgtggaaatacttgtggtatggtaaattatacaaaaccaatgtcttggataactggaaatgcaatggtgataaatacagataagtatcaagataaggtgtgtaagagatatttatatcattatctttctgcgtataacttcaatagtattatttctggctctggacagccgcaaatagtacgtactccattggaaaagttaaaaataacattgcccactatttctgaacaaaaacagaaggcaattatttttgataaaattcaagacaaaatagatattaatcataaagtattaaatctttatataggtcaaaagcagtatctactccgtcaaatgttcatataaacatctggcggagcaagtattgcttcaaataattataggaatcatactgtgcgatttgatttgatagttttctttccaaagattgcattaggtttgcgatgaaactttgcttacttttacaaggtataggcaaccttaaatccgtgagagttgatagcactatataaggagtgttgcttgaactcttttctattgcaattcttttgggtagcagtacttttaacgcccatttaatgtattggatattttcggagaacaagtctaatacataagtcctttgataagcattaaactttcccttataataattgatatatcccaaattagcaccatttccagagattagtaaagcttctgtatcaaaagcgaagctatcaattttgaatggttgttctgcacaagtaaaaaatggataaatcccattatctacctgtgcatttgcatcaagtttccctgttgtaatttgacaaatatcaccaagttttacatatgtgtttccacttgttgattctttaatgcaatgctgtgcaattcctttgattaaggactgcagtttctcaatgattttgttttgggtagcaatgcgtttgtcaagtaaatctaataatcgagatattttaagttgctcttttttgtcgggtgtataataaagatgaattgttgctaagtcctcactattaatagcagggtaacttgaacctgtgcaacgaaccattacttttctattgaattcgtctgtattcaatagatgataaatatagtttggcaattctgttgttctaatttgagcatatccagtagaagcaacccattgttgattactcgtatttagaatcctatgaatatagttgtttttctgataggggcgcacacattgaaacagaatatcattgttatctataacacgttgtgctctacttggtgcttcttctcgcattatttcttgtatttttcttaactcacctttttcaacggcttccaagtctatataaataaaagtgttctgaagcggatctgattttggatttatagtggctatatcttgaagtgataccatttcccactccccactaaactccgggaatctcaaatggggaacattacctattatatttctctaattattagaaccaattaaattcaaaattatgattcagaagacaattagagaaatttcggacgcatggcgagaggacaagcgaccgtatgtgaaactatcgacattggcagcctacatgttgattcttgaaaatcacattttgccaaagtttggtgagagtaacgaacttcatgaaaatgatgtacaaggctttgtgcttgaaaagttggaaggcggattgagcgtgaaatctgttaaggacattcttattgtcctgaagatggttatgaaattcggagtgaaaaacgaatggatgaactattacgaatgggatattaagtacccaacagacgttgctggtaaaaagttggaggtcttgtccgtggcaaatcataaaaagattctgaactatattcagagccacttttcctttccgggacttggtatctatatcagccttagtaccggtctgcgtataggggagatctgtgctttgaaatggagcgacatcaatgtatatgatggaattctaaccgttaaccggacgatagaacgcatctatatcatagaaggagagagaaaacatacagagctggtcatcaacacgccaaagacaaaaaactcttgccgtgaaatcccgataaacaaagaattgcttactatgttaaagcctttgaaaaaagtagttaatgatgactattacattcttaccaatgacgagtgtccgacagaaccacgtacgtaccgtaactactataaaaggcttatggagaaacttgatattcccaagctgaagtatcatggactccgtcatagttttgcgactcgttgtatagaggtcggttgtgactataaaacagtcagcgtattattagggcattccaatatttcaactacgttggacttatatgttcatcccaatatggagcagaaaaagcgttgcattgctaaggtgttcaagtcactgggtaaataaagttatgtatagagcgagggaattaatgctgtaatttcttcgctctcaattgttctgtgattcagaattatgttgtatatttgaatatcattttagaaagtaattatgttatttgagattattgttgattgtattatggctttgggagccttggcgacagctgcaacttttattcttgtcttaagaaatcagaaaggaactcagcagcagattaatagcttgtcgcaaatggctgagatgtactcacgtcattatcaattagagcgaatttaagctggaagtaacatatatcccaaaattcagataagtttgaagaatgatacgatgtggggattgaagatccagattaaaaacaattcatatccggtagaagtgtatcgcattatgataaatgaggctcgtcatcatttagatgtaaggttaaaaccgaaaagcgattatattcaaatacggcaaggagaaacaaagactattttgcccggagaattatgccgtcaacagatatacacatttgatgcatcaataaggatatatctcataactccttttgaagaggcgtatgaaataagatatataaatacagacaggttaaactactatcagtcagaaccagttcctattctgtattccaaagaagatcatgagtcttcaaaagttcaaactactcaagtcaggcagtattctatacatggtggtatcaaaggaactattaaagataatttccctgaagtcgcaagagatttagaagactaatttaagcatgaaaataaagtctcaactggtagtaatctctatccgattgagacttttcgtttatttacctctatccaaaaacttctgtattgctaccgttataccaatccccgagacagccataagaatacaaccagtagtagccttccaaatcaatccggaatgcaaaatctctgcattagccactatcatgcacacgaaaaaagaagatagagcgactacaatgataatcaaaatgtagaatgccgtatatgggagggggatggcattgtcggctttcttcattctccgctcggcttccttgcatttgctctcaatctgatcaagaaaattgcagagaagccttgctccaaattcaactgccaacttatgcatttcttcagaaatgataggtttgcactcacgtatagaaccggacagattttcaacttctgttctcagcttatatacattgttattcagcctagcaagttcttgcacattgatatcgagtaagtggttttcttcctccagatattcattcttgggagtggatcttatggattccgcttcactcatttctgcggaaaaatcaaatttcttcttcatgcgcttatcgttttaatcctgttttcggtttctttcctaagaaccggctggcggcacgagcacatctgcgcgcccagagcaagtcgtcttcgtccttatctctccacggaaggtcgctttgtgagccaccgccacctcctccggttgttacattgggggtatctatcagtccgacaaatatagctacagccatatcggtaagttcttgacagttggcaataaacctgtaatcaaattcgtcattgaaacaatcaagtactttttccgggatataaaatttgtaatccttaccttcatggctgagggtataggaaatcatctcctgactatatgtgagatattgggtatagtcgataggagcaatcttatgtatcgctgcctgttgaacggcttggggtgtattgtttctaatggcagtagctggctgatgatgcagtttctcccatgtcgcaggaagtttcgagaccatcaggtttctgccgattcccaattctgaagccttgtatttggtgtttccattcatgagggcatatccacgaagaatacctttcttgtcctctctttcatggacggtataacctttccgtataagagcattcttgtactcatcccatgaccacgatggcattgctttcaacacctccatacagtcccggttcacttgtggaatgtttcgatttctgatttgtgccgctgttgtccagccacgtttctttgccactcgctcggctgcacgttgcgcccgaagatgaatgttgtggtcgttgttgatattaccgttttcatccaaacggcaaaccgctgcatgaaggtggggaacttcgcctttagattccgtatgaagccaaaccgagtatttgctacccaccaaattggtcggacaggaacggacttgtccatccttgccggtaatcacttgtttgtcgaactcctcggcgaattcctgccaaagattttgccaatcttcgatgtcataaaattgggtatgttcgggcgatggactcagctcgattctgataacggaattctttatcggtcgatgttgggatagggtcaactgcatggagctccatattcccatagcgtccggttctgagggcaacagattgtccaatacccgataaatcttttccggatgttttttgtgctgtgattcgccggtaatgtaacggatgtcgtttataccgtgcgatatggctttggctttcgcaatcattcttcttcggattttgggttagacggaattttattcttctcttttactgcattcaggaactggcagacactttcggctacattgcctaattctttcagccaacccaccataaacggaatctgattgaacattaccatacgttgctttgtggacattccgtgtagggcggaggtgtattttacgaggtctgaccgacaatcgtccagattctgtaacaataccgcttcttctttcgtgagccttgctttgggcttgaagttatacgcacgtgataatatgtagtcacttacagtcatgccgcattgtccggccagtgattttatctgctccttctgagtaggagtgacttttgctccgatgaagacgtttctggtttctttcgaggagtccgatgtatttttaatatcttctttcatttgaattattttataatggttgaataggtgcgagcttgcgagtaccgcaccggcgagggaactgagcaggcgagagcgccaatgtacaaccgtaacgcagtgaggttataccttggcatatctcgcaacagttacctgttgatgcttcacgacaagccatatcggatgcgtatagtgaactggcactcggataggaaacataggatgatacgagtctctaaaagaggggagaatatgaatatctcacatgatgtcttcctccgactttgctttattcttatatatatgccccaacaataaagtaaagttgaactcaataatggtattctggattgaatgcataatctttcccttcttttataaccatttgtttgtcgctgagcaatgttgcgacctttaccgccttgttataaccgagttttataccctgcaatccgtaaccctctttcaagcgttctatataatcatcgtaattgctgatgttgccattggcaaaaacggcatccaatgctggacgatgtacattttttggaatctccttgtccggatcgaacggtcctttgattggtcgtccggtcttcttctctttgggcagataggaccctaccggttcgggcatggcttcctcgtttatgcggaaagcgaaaggttcaaactcgcggtcacggatatggacggcttcgaccacgcttacagtcttgtcctctttgtccacttcgacctgcatgatggtttccgctttgttgttgagttccgtgccgatgtgaccacgggcatgctcatcattcttgttctgatgcaagacggtatggatatggatttgcctgtcatccgtccactgcatgaatttggagatgatgtcggtggattcactggaggaattgatgtcgtaaaggaaatcacgaatgccatctatgatgaccaatcccaaatccggtattgtgccaatggcctgttcgactatcgccagacgtagtttaggggaaaacttgcgcagagccagcataatcagattatccggattcttgtattccggtaagtcggccaaacgtaagatgcgtttcaataccagctggcaatgataccgcccctgctctgtgtctatgtatagaatcttccgcttattttcgggaaatgtagaccgataatgaagaacgctgctgccactcaatgccgatgcgacaatggctgaaacgttgaaagttttcttgcttttggctttcccgatggaagcactgaagtttcccaatgttccgataacagtatcgtccaccatcagaaccaccggggagtgttcgtatgtacttgttacgcttattgtagactctgccatgtaagcggccaattcttccggagaaagaataatagtgtctgtcttttccatcgctaccagtttttagggttcggtttacggcgatgggaggcgagcaaggattcattctcttcctcgaaactttgcggagccggattcttccgggaagattccagccatctatccagttcgtcacgatagatgtagagatgctttccttgttttataaccggaatatcgtccttcttgaccttgtaataaaaggtcgacaacggcattttaagatagttgcaagcctcctgtacggtcatggggacgtgcgtattctctttggtttcgtactgcttggaaagtttctccgtaagcaggttttccatacttgcgattctgtcgcatagttcgcctaccacagtcggcaggtcgttgaatgtcagttggtctttttccatattatgattgttttaatcgtttaacatgctgcgaaccaactcaatgaaaccttgcagaacaatacagaccggattaattatttcgtctgcatactttttttattgcgagtcatcattatctacatctaaatggaagcgatagtcgcctttatctggtacatcaatgggaatctggcttgagacattatcccgtaaattaagtttaagatattcaagggtcgcgtttacgagttcgtatggaaatgatttcttgataaaaatggctcttttcgctaagggcactctcaagcgttcaccgacattccatgccaaatggcgaagccccggcgacctcagcggattgtctatattggaacgaatcggtttatatgactcaggttgatcgtaagccatatactctatattggcaatgagggtggcaatatcctctttggagagatagggggcagttttgacggttacatattcccgaatcgcatccatgatttccacttgcctttcaatctctttctttttgagttccaccaatatggaatcatatttattcaaatgagaatcttgcggacaatcagagtttacagtatcttgattcgactgttgggatggagaagactcttgttcaggcaaatccatcggttgcttgatgggctgcgtttcagtagcatccatagattctatgatgttctctgattttacaataggggtagatggctcgccaaaagagaagttgataggattttttgtcagccatttatagaaaaatttgtgcaggagtccgcataatatgatagctattaccagtccaaggatgacaggagtcgttatgcgcatgatattgatgtcatggcaaaggaaaagataagtgtctatagccgcataaatgataacggacagtgcgaggataaaacttatctttttagtctgaatttgttttttattcgtcatggtctgcaagtgtttggaatcgttttgcgctaaagatataatcgatattccagatagttgcaataaaaagaatgatagttaccacgtatcatgctaaatatcacggtcagagtatgattttaggtgaaaaatcatactctgaccgcagaaatcgaggacaaagcagctgtcagtcttgccgtgtcagggtaattttcttgctggcttcacgtttgttggcatccacgactttgatatacctttgcgtggtggtgatactcttgtgcgccatgatgctctgtatggtgcggatgtccgttccggcagctgcttgtagcgttgcaaatgttctacgatacgagtgaaatgttatgttcttggtaattccggcagaacgaatccactctttcatcggtatttgcgtccagctacgcataagccccttgaataccaaacctttcttttcagaactatagccaatcaatcccaaagcttcttcactgatgggaatgatgtcttccgccttgttcttttgcgtaatgatgtgtacgcattttcctccggcagaatagtccacgatgtcttcccaacatagcgagagaatgtcactgatgcgcaagctggtcatacaggaaaacagcgatgccgttttcagaataggcttcttacaaggtgtctcggccaatttgtacagttcctcaacagacagggcctctttcattacatcttctgtctctatcttttccaagaagtcattgacattggtctttatcatcccattacggtagagtattttcaggaaacctctgaaagtagaccaatatcctgatgcggagttccgtgtgatacgtccgttacgccttagcttcttggcattcagcagatattcccgaaacttgttacagaggtcgatgtcaatctcttcaaaggtgcatttgccatgtacgaagttattgaaatgcagatagacaaactcccatttctggtcatgcttacggagctgcttgcgataatactccagaaagtctgccttgagtttgtacttgtcaaagaagtcataccgttcattgactaccgactcgaacctgcggcaacggatggcttcggctttctcggtcattacctcgttgaaattctgttcacgtttgttcctcggattggcatagatataaataccaagcgattcatgacggataactttcattgtctctttgtctcgataccccggataataatccagatagaaagacatcatcctgccttttagcggacgtgtccttaatgtcacggtcttgcattcatgcataatgttatatttttatggttattattaattcgtcggcgaaactctataatgtagtcatgcagattacctacagcagggattaatttttgaataatttacggatagccataaattagactatttgcgggcacccattacccggtcaaactccactttcaggaatctgacgaaccgtccgttcttctcccggttgatctgatggaattgcagaataccgtaaaccgaatcacgagagagtttgaatttctccatcgcctccttgacggtgtagtattccgccttgctctcctgttcggaactcttcgagaggtcgaagtggagctttgagtagaatatctgcccatgctctttcttggagggaatgttgttccgatacacttgcgaacggatggcgacacgtgtcataccgtacttctcctgaatctcttccggtgtgtaccattcagtaaggtcggaatctacctcgtatttggcaaaggcagcatcgatatgtttcttgctgtaatagttgaactggcggattctcactttcggcactttatgttgccgagtgtaagtccacacccatttggcgttgaccttatatttttccgcaatctcttcggctgtgtaatactcggagatgttgaagtcgtttttcgcaaccagtcgttcgtaaggtttgcttttgagcattaactctatgtctgcacgccttaccaaagccattcttccgctaattcgggatgctctaagtttatcctctttgactaatttataaatgtactgacgactcacacccatcaatcgggcagcctgcgaaaaagtgaaatattcttgtttctccaaactggagcgcaactcctgcatttcctgaatatggcgcagttccattttgcgctccttgatacgatgtttgtaacctcgcttcgagcattgagggctacaataacaggtcgttgttttctgtgcaatgaatggttttccgcaccattgacaaattctctttacttccatatttctatatcattttctttgttttttaatttccctttttgtctacacatgtaaaccattgtcaacacacgtcaactaatgcgtcactgtgacattcgggctaaccgtgaatttgtgtcgcggtagaaatatgatagaaaaatatggataaaaaccgttacttccaaatacggattggaaagtgttaaaatagaaaagtcgctgaaatacagcgactttgttctgaatggttatagttggttatggcagattctaagccatcacttgccgatgcaaaaatgttgaaagatattttgaagcaccatatcattcgtaacctcccccgctatgtccgaaatgaagaagatgcactctcgtatgtcttgcgaaagaaaatctccggaaatctgcgaatcaagtccgttctgtactctatgaatagcttccaaagctttgtttaaagcttcgtaatgtcttacgtttgtcacaataatatcattctgtgtcactgtaggcaagtgtgctgcatcaataagcattttttgtaattcacttgtattcttccgttgtttggccgagatgaaaatagattccgtagattctttggggaagtcttttaataaagataatacattctctttctgtttatcttcaatcaaatcagtcttattgaatacaacaatcaaatgttttccttcacaacgtggaattattttctccgataactgttcaatttgagaagcggcattcacagcatctaccatccaaagaacaatctccgcctgatccaacttctgaaaagtacgttcaatacccaaactttcaatcgtgtcattggtttcccggattccggcggtatcaatgaaccggaaagtgattcctccgatattgacagtatcttcgattacatcacgtgttgtcccgtgaatatcactgacaatggctttatcctcattcaataatacattcagtaaagtcgattttccggcatttgtttcaccgatgatagctacgggaacaccattcttaatggcgttgccgacactaaatgaatgagccaaccgcgaaatgacctgttcaatttcatctgccagtttccttaatgccgaacgatcggcaaattccacatcctcttcgctgaaatccaactccaattcaatcatggaagtgaaattcaacaacttgttgcgtagatctgtcagctctttactgaatccaccccgcatctggctcattgccaatcggtgagtggcagcagatgaagaagcaatcaagtccgccacagcttctgcctgacttaaatccatctttccattgaggaaagcacgttgcgtatattctcccggctgggccatgcggcaaccgtttttaataagcaactgcattacctgttgaagaatataagtggaaccatgacacgtgatttccgtactgtcttctcccgtatacgaatgaggagcacggaaaaggctgacgagcacttcatcaatcatctcgtcttcgtcataaatacgcccgaatgtcaaagtatatggtttttgttcgctcaataatttgccagctttggctggcttgaagatgctgccggtaatagaaatagcttccggaccggaaacgcggatgcttccgatagcaccgccttgagcggtagcgatggcacagatagtatcttgaatcattcttttttctttttggatgagcaaagataattgtttctaagtaaaaaacagaaaattgagcacaacttgtgctttatttgtttatatttgctgccgtgcagtggtacaccaaacaaaataaaacaataatgcttatggaaccagcgattaatttatattcttccaatgaaaagagtgaactcatacgggagaactcacaagaaatattttctgtccttgcagctcatcaaatagctttgtgggaatatgatatcattacgggcaaatgctccttttcaaacgattatttttttacactgggattaaaggatgccgggatcatttttgaagatatagatgatttctatcggtttattcatccggaagatattgaattctataaacaagcctttgcagaaatgctttcatcagactctaagacttcacaaattagagttcgttgtataagtgaacaagggaaagtaatttggctggaagatcattttctgtcttacaaagagagttgcgaaagtcatccgggtaaactgctggcatatacggtgaacgtcacttcacaatgcgaaaaggagcaacatatcaaatatctggaagagtataatcgcaaaataattgaagcattgccggaattcatttttatttttgatgataatttctttattaccgatgtcctgatggcaccgggaacgatattgcttcaccctgtggaagtgctacgcggagcagatggacgatctatttattcaccggaggttagcgacttgtttatttgtaacattagggaatgtttgcgtgatggtaagttgaaggaaatagaatatccgcttgaagtggatggaagtctgcattattttcaggcacgtatcgccccctttgaaggaaacagggtacttgcgttgatacatgacatcggagaccggattcagcgttcgcaggaattgatcgaagctaaacgtcgtgcggaagatgctgataaaatgaagtcggtctttttagctaatatgagccatgaaattcgtactccgttgaatgctattgttggtttttcggagattatcgcagtgacagaaagtgaagaagagaaaatggagtatctggaaattattcagaaaaacagtaacttgttattacagttaatcaatgatattttagacctttcccgtattgaatccggcaaatcggaaatgcatttccagcaggttgagatcgcaggactagtggaagaagtggaaaaagtgcaccagctgaagatgaagtcgaatgtagaattgaaagtgattcgtcccgaaggagaatactggacttctactgatcgtaaccgtgtgatgcaggtattgttcaatttcttgtcgaacgcaattaaaaatacggaaaagggaagtataactttaggcttgaaacatgaaggatcctggctgaaactgtatgtcagcgatacgggttgtggtatatccaaagagaaactccctcaaattttcacccgttttgagaaactgaatgactttgtgcagggcaccggattagggctttcaatttgtaaaagcattgtagaacgactgggcggccgtatcgaagtaacttcagaattagggcaggggagtgtgtttgcactctatttaccctatcaggaaataccgaaggaggttgtcgaaagaagacttccgcataagaagaatgtcgatgaggataaacgtaaaaagatattggtggtagaagacattgagtcgaactttgcccaacttaatattcttctgaataaggaatatattatttcatgggtacgcaacggacaggaagccatcaatagtttcatccgcgaaaagccggatttgattctgatggatatccgtatgccgatcatggacggtattcaagccactgaaaagattcgtactatttctctgactgtacctattattgcagtgaccgcgtatgctttctatacagaacagcaacaggctattcaggcaggatgcaacgctgttatctcaaaaccctattctttggaaaggttgaaagagacaatagaatcttatatcggataattaattttctaaaagagaactaacattctgaatgttgtagtgttatttattatatagtagtaacattataatatattagaatatggagaaagtgaaaaagatagtccttatcggggcaagcggctttgtgggctctgcccttctgaatgaagcattgaatcgtggtttcgaggttacggcagtagttcgtcatccggaaaagataaagatagagaatgaaaatctgaaagtggtgaaagccgatgtctccgcgcttgatgaagtggctggcgtttgtaaaggtgcagatgctgttattagtgcattcaatccgggatggaataatcctgatatatacgatgaaacaatcaaagtttatctgaccattattgatggagtgaagaaagcgggtgttaatcgttttttgatggtgggcggtgccggttctttgtttatcgctccgggcttgcgtctgatggattccggtgaagtacccgaaaatatattgccgggagtgaaagctctaggagagttctatctgaactttttaaagaaagaaaaggaaatagactgggtatttttctctccggcagcggatatgcgtccgggagtacgtacaggacgttatcggttgggaaaagatgatatgattgtagatattgtaggaaacagccatatctctgttgaagattatgccgccgccatgattgatgaactggaatatccgaaacaccaccaggagagatttacgattggttattaataaaaaaacaatggcttgaatctacacatattatcagtgaaagattcaagccattatacattcttttaattgcatttttattctttcgattacaatttaactctcctaaatatagatttatatcctgtcaagtactgtcttaattagcgtatcgattgtattcttatatccggtgttggcctctttgataagtcggttggctatcaccatgcagacggtcattgccttgtgtcccatcaaccggctaagtcctgccaaagctgaactttccatttcgaagttggtaattttgtaacctttatattcgaacgcttcaatcttatcattttgtttcgggtctgctaacgggatacgaagttcacgtccttgaggaccaaagaaacctccggcagcgattgtcactccacgtaccatgtcgtctttggcgatccggtcgatcaattcttcactggcatcaatgacgtaaggagcaggagcgcacatatttcccgaccaacccatgtgattgaggaaagcacgttcgaaaggcaaatcgcatacggcattacgtccggcatagaaattcagtaacccgtcgaaaccgatggacttttgcgaacatacaaaagttccgacaggcgtattgggttgcagaccgccacatgtgccgatacgcactaattccagttggcggaactgatccttttcttcgcgggtgacaaagtcgatattggcgagtgcatctaattcattcattacgatgtcgatgttatcgcaaccgattcctgtagagactaccgtaatccgtttacctttataagtacccgtgatggttttgaattcgcggctttccacttcacattctttgttttcgaaatgagaagctacgagtgctacacgtccggggtcacctaccaggattactttatctgccaaccattcgggttttacgtgaagatggaatactgaaccgtcttcattgattatcaattcagaggatggaaagtactttttcatgtcattgaaaggttttagttttataataggattgtatctataaatagaaacgccggaaccggatttaagttcagaagaagtctctttctttttccataggaaaggggagaacgtcttacgactgaaataaaatcggattccggcgtttgtgaacgattatttgctcaatggctgattgccagcattgcctgttgtcggcttggcgatattctcacgcatggaagtatcagcttcgatattcttcatgcgataataatccatgatgcctaagtttccactgcggaaagcttcagccattgctttaggaacttcagcttctgcttcaatcactttggcacgagcttcctgtgcttttgctttcatttcctgttcggaagctactgccatagcacggcgctcttcagcttttgcctgtgcaatattcttatctgcattagcctgatcgatttgcagagccgcaccgatgttcttacctatgtcgatgtccgcaatatcaatagacagaatctcgaaagcagttcctgcgtccagacctttacgaagtacaagtttagagatagaatccggattctccaataccgatttatggttttcagaagaaccgatagacgaaacgataccttcacctacacgggcaaggatcgtatcttcacctgcaccaccgaccagctggcggatattggcacgtactgtaacacgagccttagctatcaactggataccgtctttcgcaacagccgttacaggaggagtatcaatcactttcgggtttacagacatctgtacagcttcgaatacgtcacgtcctgccaagtcgatagcagtagccatctggaaaggcaattcgatgttggctttcgatgccgatactaaggcgtgaactaccttttctacgtgtccgccagccagataatgggcttccagttcgtcgcgggtgatatttttcagaccggctttgtgagcttcgatcattcccggaacgatgatatacggcggaacgttacgtatacgcattaagaatagttgtatcagcgagatgttaactcccgaaactttagccgacaaccaaaggaagaacggcacgtaatggaaaaatattatcaagaagataatacctccggctatcagaaagataggcaagtagaaagatgattccattgatgtttttattaagtgaatattattctttgtgtttctcaaccatgattgtaccgtcggtgatccggcttacgattatcggagtcttctcattgaggaacccgtctattgactttacctctacaatttttccgttaatctcggcataaccgatttgtgccaggcgggtagtactgattcctatatcacccactttgacgctatcttctgcgctacggtctacttttgaatcgatatcttttttcaacgccagtttgtccagcattttcgatcgcataaaccaaatcagtgatccgatgcaggcaaccgctgatatgccaagagtgacaaatcctcctgccatacctaaattggtgaatgcatagtagttggcatacaggatgcaaaccaatgcagaaattccggccagactaatgcccgggatgacgaacagttctaccagaaacagtatgactgcggcaataatgagaacggcgataatgagtatatccatagttcagagttattatttattttgttttttctgcattacgtacattcacttcgagagcatcgagttcttcggacatttgcagtatccgcttttcgaggtcgagaatggcaggagccattttggcttttccctgttggttggcaccggcatattgttgacgaaggccgttcagcttttcttcttgttgataatagtctttttccatctgctgatagcgttggaaaagtgtcttggcttttgcggatttaaagtcgctcatcagatagtaagtcgtatggtcgtcaatgacaaactcaaagtccatggcacggcgttctttgggcttatgactgatagcagctttcaatcgttgcagtgcttcggtaaccgcttgtttatccttccaggtttctttcagcgaatgaatctgtgccagacgaatgatctcttgctgctccattgcttcataattataagtctgtttggaagtgttagggatgaatacataaatacatatctttccttccggttggaaacggtcggaagcaaaccatccgaggttgttgtattcatcgatgacgtacatataatcgttgtacggcgagttgaacggcatacccacattttccggaacaagataagtgtcggtattcgtgttgtagcgagtgacaaaaatatcatagccacccaatccctcgccatcgctggcgtaataaacggtgactccatccgatagaacaaacggataattcgcattcccggaagcattgatactacccggtaacggacgtccgtcactccattcattcaacaacttgttctttgaaaagatatcaagattacctttctcgcccttttcgctataataaattttatttccgatttctgtttcataaacagttcccggatgatctccttctgtcttgaagaattcattgaaagtaaacagtttgcccgattcttcgctgatcttgtaagcgttcaggaaagttgctttgtccacaacgaaactgtcgatgatacatacttcctcaacccccttcaacatacgaaggtcagatttgcttttctccagaagtttctcagcttcttccgtcggtttcttgcgtttacttaagtctgcgatgtattcttcaaagcagttcactgcgtcttcaaagcggtacgtctcattatatgcttgtcccaaatagagttgtccaccggtgatacgtttctttaccgctatttcaagaggtttcaccgcctcttctgcctctccggttttcaggcaacatacgccataccaataattataattcccgttcgacggttgtgatttagtatacttcttaaaaactggtttggcttgttcgtactcacctttggtaaataaggtgcgtgcctgttccaacgtttgtgcagagacttcgcaaaggaagaggctgcaaattaaaaatagaatatattttcctttcatcgttttgagcgtttatgagtgacgggtagattgaaaacattgctgctttcgggcaccggtccatttatcaattgttcaaaagtacaaatttattagaaataaaccctttttcagtgattctattatgttaattcttctttaaatcattcttttcgcttacttttgcagccgatttttaaagatatgacacaatttacggaagaagagaaaaccattcgccgcattgaacggcggtttaataaaggagtggtgcaatatggattgatagaagaaggagacaaaatccttatcggactatcgggaggaaaagattcgttggcgcttgtggaactgttggggagacgcgcacgtatctataaacctcgcttttctgtcgttgctgtccatgtagtgatgaagaatattccttatcagagtgatacggaatatttgaaagcgcactgtgagacgtatggagttctctttgtgcagtatgagacagcttttgatcctgctaccgacacacgtaaatctccctgcttcctctgttcatggaaccgtcggaaagccctgttcacagttgctaaggaacacggatgcaataaaatcgctctcggtcaccatatggatgatattttggaaactttattgatgaatatcacttatcagggagctttcagtacaatgccgccccggttggtgatgaagaagtttgatatgacaattattcgtccgatgtgtctggttcatgaagccgatttggtagaattggcagctttgcgtcattatcagaagcaagtgaagaattgtccttatgaatcgcagtccagccggagtgatatgaaaggtattttgaggcaactggaagcgatgaacccggaggcgcgttacagtctttggggaagtatgaccaatgtacaggaagatttattaccggataaaatagattaatttgaatagattgttatgaaaggattctataccattttgttgctgatcgtatctaatgtctttatgacatttgcttggtacggacatttaaagatgaaacaggagtacagttggttcgcagctcttccgctgattggtgtgattgcgttcagctgggcgatcgccttttttgaatattcctgtcagataccggccaatcgtattggctttataggcaatggaggcccgttttcattgatgcaactaaaagtcattcaagaggtaataacacttgttatttttacagtgttcactaccatcttctttaaaggtgaggctttacattggaatcatctggctgcatttatttgtctgattgcagcagtgtatttcgtgtttatgaaatagatatttgccaattgaatagaggttctgttttactcaagtagaacctctgtttgtataatatataaatatatatatatatatatatatatatatattacggagtagttatgtattttttcattccctccgtataataagtcttgaactctccattttctccactataaataaagtaggcgtcaatcgttgtatccgctttgcagaaagcttccgcttcttccagtcccatcaccatgaaggcggtggcaagggcgtcggcagtcatacagtctttggcgattaccgtagaggacaagatattgtgttgtaccggatagccagttctagggtcaatcgtatgggcgtatttcttcccatccttataataataattgcgatagtttccggaagtagccaagcctaaatctgttatctcaagaattgtctgtaagtcttggtttacggccagtgaatcgtcgatgggcttattgattccaatgcgccataagcctttggaaggatttttccctttcactaccacctcgcctcctatatctaccatatagttttttattcccttacggtcgagcagttgtgcaattacgtctaccgaataccctttggcaacggcactacaacttaacatggtacgaggatcctgtttgataactttgccgttatccattttcacttttttatatccggtgatttgtaacagactgtctatcattaatgaatcaggaaaagcaccttttttgaaaccgaatccccaagcattggcaagaggggctactgtaatgtcgaaagcaccctttgtctcgcgggaaatttccatcgagcgatggaagcatttctggaaaaaactatcagtcaccagctcttcattgcggttgacgcgactgataacagaactgtcattgaatggcgataaagattggtcgaagcgttttagttcagcttctatttccggttttaagtcaccgtcatgctgataagtaattttatatactgtcccaaacaccaaacctttgacactgtaatagccaacttgttgattatgtctgactaatatccagatagttgccaaaatcaggaaagccagccaaaggaaacttttttttgttttcatacgctcttctatttgatgagaaaactcgttttattgaagaaataaatgttcaattaatatctttagtccgataatgactagaatgatacctccccataactctgctttcagtttccgggcgatgccgcagccacattggataccaaagatcagaccgatgagtgacatgacaaatgaaacaaacccgatgatgctgataggaggaaggatttcggtatagtcctgaactcccagaaaggcaaaggaaatgccgattgccaatgcatcaatacttgtggctattgccatagtcaataccactttcggatttgccggattgaacagtttacaacattcttcttctttgaaagattctaaaatcattcgtccgcctaagaaggcaaggatcgcgaaagcaatccaatggtctacactttctataagatgactgaatgtctttgcacacatccatccgataaatggcatgattgcctgaaaaaagccgaaagcaaaagccatgattagcatgggtttccaacgggtacgtttcaaaataataccgcttgcaattgagacagcgaaacaatccatcgccagacctattgcaagcagccaaatctctagtcctgtcattgtattctaaagaggcaatttataaataagggaataagtgattcccatgttatttgatttaaactttccgtaaccgggcacgtaccatgggtctccatattctccggtagatgctttggttttgtatttcatacgtaccgaccaccccatgttgaagtttttgtaaatacgtactttgacgcctaaaacgatttccagccattgcaccgatcctttcatacccagatggctgaatggcacacttcctccccaataaccgtcttccaaactggggttacctattacatctccccagataggatcatctgccggcattgtggaaacatcatatttaaatggactgaatgcatagcgaagtcctgcatacaagtagctattcttctcttttttctttgccatggtgttgtagtccacaccgattcggaagaatggagccattttgctcttatagtgtatgcctgtttcgctccaggtatctgttcctcccataccaaactcaatagtagggatgaatttattcttgaggttaacggctacgctgacttcagaactcataaagtcgcctcccagcagcttgcttccaatgccatataaatccacaccgacatacgtaccattgtagagcggaatggtatctatctcggcaacctcttttttcttctgatctcttttgggcgtttgcgccggacgttgctgttgtgccagcaacggaagcccaatgcaaaagagcagaagcagactaattagtcgtttcatcaggtgtgcgttctggccgataattatagaatatctgcaagttctcgatttcatttgtattggcttctttattttttatatgaagagaatctatctggtccggctgcccgttgccatagggaggagggttacccggtcttcccggtttcccaaatttagcgctgattatattttgtttcatcatataaccacattccatggactggaaataaggagtattttgttgtacaatgtataatgtgtcaaaatctttttctctacgtttgggatcgtatctgaatatgaacacagtagtgtcacttgtgtatcgtagtggcaacatcagggtatgcacattcttttcattgttcagaatgatagagtcggtgcctaatgctgtgattgttaatgaatcaagcgtgtcttttaatgcaatagtagggttatccggattaatggtatatattgtgcagtacatcatcggacgtcctgccaatgagcaatcgttctcatccgagcaggcactgtgtaagctgactgcaccgccaatgatagtcaatatgagaaagatacgaattaaattcttcatagtcagtttattgaatgtgaatcaaattttcttttctatctgatagttattccgttccggtgcattgcgcgagatgagttcgccaaggaatccggctaagaataattgcgtacctataatcattgccgtaagtgacaaatagaaatagggagagtcggtcaccagtcggtaggggagaccgttgtacatggcatatagtttgctggcacctacgatgatgacagaaatcattcctatcagaaacatcaatgatcccaacagtccgaagaaatgcatcggcttgatgccgaatctggagaggaaccaaagagagagtaaatccagatacccgtttacgaaacggttcagtccgaattttgttgtgccgtatttacgcgcctggtggtgtaccaccttttcaccgattttcttgaatccggcgttctttgccagataaggtatataacgatgcatctcaccgtacacttcgatatgttttacgacctctttgcgataggctttcaatccgcagttgaagtcgtgcaggtttttgatgcctgatactttgcgggcagtagcattaaacaacttggtgggcagtgtctttgaaattggatcatatctcttttgcttccagccggataccaggtcgtagccatcctttgtaatcatccggtaaagttcggggatttcgtctgggctatcttgtaggtccgcatccatcgttatgactacgtttccttccgcttcagcgaatccacagtagagtgcaggtgatttaccgtagttacggcggaatttgataccttttacatgttccgattgagctttaagcttttcgatcacttcccatgaatggtcggtacttccatcgttaacgaaaatcacttcgaatgagaatccgttggcttgcattacccgttctatccaagcatagagttcgggtagtgactcttcttcattgaataatgggattacaactgatatatccatttttttattactaattacttacgaattacaaattacgattgagacactccgtcattttccgatttggcctttttcattaccatcaatgcggtgggaatggccaggatacttccccaaaatacatcccatgacaatagttgcatggtgatattgatggaagtaagtgaacgggcggtatctattgtttcttttataacttctttgttttctatcagagccggggtgttggtcatcagttcgtcccacaactggatgtaagagttgatgataaatccatgatcgatgaattggaaataggcgtagtgagccacagctaccagcagagaagcaaacatatacataaatatggtaaagagcatggcatgtgaaaattggatacttcctccgcaaatcttatcccggtacattttcgcatagtgatatccgatgaaaggtacggacaatgtcaggattacaaataaaagcgaaaggaaaggtatgtggaatcccagcggaaataatatgaacttcaatatccagtagattcccatatacgtgccaaaatgcatggcatatttttgtaaatagcttctgttctctgtcatcttcatttataaattgcgcacaaaggtacaaataatatcggttggtaggggaaatctggttgttaaagttaataaagcagaggaagttgctgtctgaatatttttttgcaattttaattgcctgaaatgtagcctgttagtcttttgttagtaaaaaagttgtctgcagctattgcagaatacataaaaatgcctacctttgcaaccgaaaaacgggtaagtcctatacggccagctcccttcgaatcctccagggcttgatcgcagcaaaggtagttggttgtagcggcgcgatatagatagcttacccacccgcctctttagctcagttggccagagcacgtgatttgtaatctcggggtcgttggttcgaatccgacaagaggctcaaaaaaggatatataacaaatccaagaaaaaagcattcaggtattagtctggatgcttttttatatatattcgcatattatcgaaatgcacagttccctaattgttgtaatattccatttttaagaaaagcaaagatttacagtttctttttgattcatcattgttattcattcttgtatattatgctcaggataggatctgagtaaaagcatcacattggataaatggcgttgcaatattccatgaagttgcttgatgatatttatattcccggagagaaaaacgatgaattgcagttgagaggcaatttcttggttcgtttgtttgcgttctttactttcgatgttattttgcattagataaatgcctaatgctttctgaatatcggctattcccttgtcccattcatgttcgccaagtgtttgaatgaaagtacaatattgcttgagctttttgcttagcttttttaaactgttgtattcggtgtcaatgggaggattaatgtgcgcagagcgtattatgtttgacatctgcaaataatacgttttcattccattttcagaattgaatgtagtcaggatatactgtttcgtagcttctgaaacctcttcctgtaagtcttttaattgactgttttccataatcattagaatttaaaagatgaataatagattgatgggagaggaagaagtgctaataaaaaagcggtttcgcctgtcccattgtctaacataccgacggcaggtttagaggtgcattaacactctctatgggggtacgaaaccgcccatataagagttcacatacgaacataaaaatgctcgctgcgatagtaggcaggtttccccaccgtctgttaatatgttagacgttgcaaatgtagccttattaattcaattcgcaaaatattggagatatttattgatgcttagtgaagctagttttcttacaatgcaaaaagatttagtgaatggttaatatgtaaaaatccccggataatctaattgtccggggatgaattattcaagtaagagaatattgaattatttaattctcttgtaaccatatacagccaaatctcccagttcctcttcaatgcggagtaactgattgtatttagccatacggtctgagcggcttaaagaacctgtcttgatctgtccgctgttagtagctactgcgatatcggcgatagtagcatcttctgtttcacccgaacggtgagaagtaacagtagtgtatccatgacggtgagccatttcgatagcgttcagtgtttctgtcagcgaaccgatttggtttactttaatcaggatagagttggcacagcctttttcgatacccattgcaaggaaatctacgttggttacgaacaggtcgtcacctaccaactggcaacggttgccgatgcgttcggtcagctttttccagccttcccagtcgttttcgttcataccgtcttcgatagagtcgatagggaatttgttgattagttcttccagatagtcaacttgttctgcggaagtgcgtttcttacctttttcaccttcaaacttggtataatcgtaaataccatcgtggtagaattcggaagaagcacagtccataccgatcataacgtctttgcccggttcgtatcctgctgctttgatagcggccagaatagaattcaaagcatcttccgtaccttcgaggttaggtgcgaaaccaccttcatcacctacagcagtgctaaggccacggtctttcaagactttctttaaagcgtggaatacttcagcacccatgcgcagaccttctctgaaagaaggagcacctacgggacggatcataaattcctggaatgcgatcggagcatcgctatgtgaaccaccgttgatgatgttcatcatcggtacaggcattacatacgtatttgttccaccgatatagcggtatagaggaagatccagatagttggcagcagctttagctacggcaagagatacaccgagaatagcgttagcacctaaattcgatttagtcttagtgccgtccaatgccagcattgtgtagtcgatacctctctgattgagtgaagacataccaatcagtttcggagcgatgattttatttacattatcaaccgctttttgtactccttttccaccatagcgctgtttgtcaccatcgcgaagttccaatgcttcgtgttcacctgtggaagcacctgacggcacagatgcacgtcccataatgccggattccaatactacgtcaacttctactgtggggttacctcttgaatcgagaatttctcgagctacaattttttcaattttcatcgtttctattgtttttgaataagatttctgcaaaagtacggacttgacggggagtgagaaatcactataaataggtattctttttgtgcctattccctatatgtcgttagtccgaccttatactataacaacgggacgatgctttttgtttgagtgcggcggggtgaatttgcaggattttaatcttcgataataacccctaacagtggaagcaaatccattgcttgcagggaagtgatgacagcccctttcagatcgctgatgttaagcgtgattccgctgatacgggaagtgcgcaaatctattccgcgaagcggagcgtgtgaaaaatcggcttctacgagatcgcaactctcaaatgcgacggatgaaaaacggcagtcgttcagacttccgttgcggagctggctgtgtgcaaaacgtacctggttcattttactcatagccagattgatataacctgcgttgcagtcatgcagcaagacgtgattcatcgttgtttccgataaattggtacccaatagtttgcaggaaatgaattctacccggtagagcgaactttcagcaaaagaaatgttggataggtcgcagttctcgaacctgacatcgctcagttgagaggaacggaatttacattcgctgaatgtctgatgctgaaaggtgcagtttttgaaacttttgtaagatttgtcgatgccttcttcttttcctttgcagaataaaagatgagagacggtttcttctctgtcgagccattcctgtagggtaatagtactgacttcctgttcttccatcatgggaggaacaacgcggacgggtttggttgggtttcttttaatcatgccgtaaaggtaggatttatattcgaattattaaatctgttttcccacatatccgccggctaacgttgcggctaatcctattcctatacttaataatgtatatagaacaaatgctccgtaaaattctcctttcagcagacctacgccatcactggagaaagtagagaacgttgtgaaacctccacataaacccgttgtcagaaacaaacggacctcgaacggaaggtggaatcgctctgaaagagcatagaacagaccgatgagaaaactgccgagaagattgaccgtgaaagtggcccatggaaaatgataagggacgattcgttcgtgcattaacaactggataaaataacgtagtgcactaccagttcctccaccgataaagatatagataacttctttactcatttgattgaaagattgatattatttgtaggcggcttcaaaatccttttcgaattgttggaagcctccgggataaactaaggtgttgtgtcatataaataccttaattccgcaacactattacaaatataactttttaagtacctgagcaacaaaaagttgctcaggaatttgccatgtcagatttttcacctatcttagtgttgcaaatcaaaatatgtatcaaacccgacagacatggcaaaggtagcaattaaatccgagaaactcactccttttggaggaatattttcaataatggagcaatttgactccagactctcatctgtaatcgactcaaccctcggtatgagatgcaggctgtatggttatcaatacagcgaaatcatccgttcgcttatgagcgtttatttttgtggcggctcatgcatcgaggatgtcaccactcatctgatgtaccacctttcgcttcatccgacacttcgcacatgcagtgccgacacgattcttagagccataaaggaactgacccaggataacatttcctacacatccgacactggcaagacctacgacttcaacacggcagacaagctgaatacactgctcctcaattgcctattgtccacagggcagctgaaagagggcgaggggtatgacgttgacttcgaccaccagttcatagaggctgagaagtttgatgcgaagcctacatacaagaagttccttggttatcgccctggcgtggcggttattggcaacttgattgtcggcattgagaacagcgacggcaacacaaatgtccgtttccaccagaaggacacgctgaagaggttctttgaaaggtttgaacaaaacaagcttattatcaaccgtttcagagctgattgcggctcgtgttctgaagagatagtggaagagattgctaaacactgcaagaccttctatatccgtgctaaccgatgcagttcgctctacaatgacatctttgccctcagaggttggaagaaagtggaattgggcggcattgagtttgagctggcctccattctcatcgagaaatggaaagggaaggcataccgtcttgtgattcaaagacagaagcggatagacggcgaactcgacctgtgggaaggagaatacacctaccgctgcatccttacaaatgactacgagtcttccgagaaagagattgtcgaattctataacctccgtggagggaaggaacgcatcttcgatgatatgaataacggattcggctggaacaggcttccaaaatcctttatgggagaaaacacggtgtttcttctgcttatggcactcatacgcaacttctataaattcatcatggcgaggcttgacgtgaagaggttcggactcaaagcaacaagccgcatcaagacgtttgtctttaagttcatctctgtgccagccaaatgggtcaggacatcaaggaagtatgtgctgaatatctattcatgcaacaatgcttatgccaatgtgttccagaatgactttggataacaccgacaacttatagtcgtgattttgcgtattgcctcaagtcgcatggtggggtaaggggcatttatatgtctttatggtgacattcgatgcactgtgccccctttttactaacgatgcagattcttttcgcttctgtatcatattaggcgcgtagttgcggatttgaggaaataataaaatgtttgttgatgtgattgagataataatctgcaaatatagaaagattatgcaatattcatatttaatccttttaatttaatcaccatagacactatatttttgggggagacaaaatgtgttatctgttttattattaagtacttatttcgtttttgaatctgtattcctctatattttctttataaagaaaaacactacttggatttccggtctatctttgccatacgattattaactaactcatttatatcatgaagaacatgaaaataggaactgcaatgtgggtctgcctgttgctctcttttttcttcggcacatcagcaaaggccgaaagtatcacttctcctgacggacaattaaaacttaatttctctgtcaacatgcaaggagaaccggtgtatgaactctcttataaaggaaaagaggtgattaaaccttcgaaactgggactggaattgaaaaatgatcccggactgatgaatggattcactctggccgatattaaaacttctgcttttgatgaaacatgggaaccggtgtggggagaggtgaaatcgatccgcaaccattataatgaaatggctgttaccctgaatcaaaaggcgcaagatcgtaatctgattatttgttttcgtctttataatgatggcttggggttccgctatgagttcccgcagcaaaagaatctgaattacttcgttataaaagaagaacattcgcagtttgctatggccggcgatcatacggcattctggattccaggcgattatgatacgcaggaatatgactataccgaatccaagctttcagagattcgcggattgttgcaaggggcaattactccaaatgcttctcaaactcctttttcaccaacaggtgtgcagacatctttgcaaatgaagacagccgacgggttgtatatcaatctgcatgaagcggctttggttgattattcttgtatgcatctgaaccttgacgatcagaacctgatttttgaatcatggctgactcctgatgcaaaaggggataaaggttatatgcaaacgccttgccgttcaccctggcgcacggtgattgtcagtgatgatgctcgtgatattctggcttccaaattgactttgaacttgaatgaaccttgtgcctacgaagatgtttcctggattaagccggtgaaatacatcggtgtgtggtgggaaatgattaccggaaaaagttcctggtcgtacacggatgatgtttattctgtgaaactgggacagacggattattcccaaacaaaaccgagcgggcgtcatgcagccaataatgacaaagtgaagcgttacattgactttgcttcagagcatggattcgaccagatcttagtggaaggctggaatgaaggctgggaagactggttcggaaattcgaaggattatgtctttgatttcgtaactccgtatcctgattttgacgtgaagatgctcaatgcgtatgcaaaggaaaaaggagtgaagctgatgatgcatcacgagacttccgcttctgtacgtaactacgagcgccatcttgataaagcctatcagtttatgatagataacggatacaatgctgtgaagagcgggtatgtaggtaatattattccgcgtggagaacatcattacggacagtggatgaacaatcattatttatatgcggtggaaaaagcggccgaatataagatctgtgtaaatgctcacgaagcaacccgtccgacaggattatgtcgcacatatccgaatctgatcggtaatgaatcggctcgtggcacggaatatgaagcctttgcagggaataagccgttccataccaccttgcttcctttcacccgtcagattggtggaccgatggattatacaccgggtatctttgatacaaaactttctttcctgtcaggcgaccacagttttgtacgtacaactttggcaaaacagttggcactttatgtaacgatgtacagtcctttgcaaatggcagccgaccttccggagagttacgaacgtcacatggatgcatttcaatttatcaaggatgtagccgttgattgggatgacagcaagtatctggaagcggaaccgggagattatattaccgtagcacgtaaggcaaaaggtactgataactggtttgtaggtggtatcaccgatgagaatccccgtacttctgcttttacacttgattttctcgaaccgggaaaacaatatgtagctactctttatgctgacggaaaggaggcggattttgaaaagaatcctacttcttaccagataaaaaaaggacttgttacaaacaagaataagatgtctgtgaagctggcacgtagcggaggatttgcagtaagtttgattgaagcaactcccgctgacttgaaaacgatcaagaaatggaaataagattccggtaaaaagattgttttcggattccccgctttttaataaatattagttgtgcttcgcaaagaaaactaaaactttgcggagcgctttttttataggacgaattcttttttgtacttttgcgccatcttttttaaaacatcatcaataaagagaacaacatgggaggttttttcggaacagtctcgaaaactagctgcgtgactgatttattctacggcacagattataactcacatctgggtaccaagcgaggaggactcgcaacatacagtgaggaaaaaggttttatacgctccattcacaatttggaaagtacttatttccgaaccaagtttgaaggagaactggacaaattcaaaggaaacgccggcatcggcatcattagcgacacagacgcacaacctatcatcatcaattctcacctcgggcgcttcgccattgtcacagtcgctaaaatagtcaatatccaggaattggaagaagaacttctcagtcaaaacatgcacttcgccgaacttagttcgagcaacaccaaccagacggaacttatcgcattacttattatacaaggcagaacttttgtggaaggtatcgaaaatgtgtttaagcacattaagggttcttgttcgatgttgcttctgacggaagatggtagtatcatcgctgcccgtgaccgatggggacgtactccggtggtgattggaaggaaagacggtgcttatgctgcaacgagcgaatcgtccagttttccgaatctggattatgagattgagagatatttaggtcccggtgagattgtccgtatgtatgacgatcatgttgaccagcttcgcaagcccaatgaggatatgcagatttgctcgtttttgtgggtgtactacggtttcccgacttcttgttatgaaggaaagaatgtagaggaagtgcgtttcaccagcggattgaaaatgggacagacagatgaatcggaagtggattgtgcttgcggtattcctgattcgggagtgggtatggctttaggatatgctgaaggaaagggggttccttaccatcgtgctatttcaaaatatacaccgacatggcctcgtagcttcactccgagcaatcaggagatgcgttcgcttgttgctaagatgaagttgattcccaaccgtgccatgctgcaaaataaacgtttgttgttctgtgacgattcaatcgtgcggggaactcaattacgtgacaatgtgaagattctgtatgattacggagcaaaggaggtgcacatgcgtatcgcttgtccgccattgatttatgcttgtccgtttgttggtttttcggcttctaaaaatgcattggagttgattacccgtcgtattatcaaggaactggaaggggatgagaataagaacctggagaaatatgctactaccggttctccggaatacgataagatggttagtattattgcagagcgtttcggtctcagttcattgaagtttaatacactggaaacgctgattgaggctatcggattacctaaatgcaaggtttgtacacattgctttgatggtagcagccatttttaaagtagtcaaataggatatttaagtatccggataaaagtatacaataaaaagagccgtgaattgctttgtaattcacggctctttttttacctttacggcactataaactatcaatttgtaaattgtaattagtaacttgtaattaaaacaatatgactttagtagacagatttttaaagtatgtaagcttcgatacacaatctgatgaatcgacagggcttactccaagtactccgaagcagatgatttttgctgaatacttgaaaaaagagttggaatctttgggattggaagatattactttggatgagcatggctatctttttgctacacttcctgccaatataaataaagaagtacccactatcgggtttattgcccacatggatacaagtcctgatatgacgggtaaagatgtcactccgcgcattgtggaaaagtatgacggttcggatattgtgctttgtgctgaagagaatgtagtcctttctccatcacaattcccggaattgctggatcataagggagaagacttgattgtaaccaacggaaaaacgttgctcggtgccgacgacaaagccggtatcgcggaaattgtatcagcgatggtttatctgaaggaacatcccgaaatcaaacacggtaaaatccgtatcggcttcaatcctgacgaagaaatcggtgaaggtgctcataaattcgatgtagagaaattcggttgtgaatggggatatacgatggatggaggtgaagtaggggagttggagtttgagaactttaatgctgctgccgcaaaaataacctttaaaggacgtaatgtgcatccgggatatgccaaggataagatgattaactctatctatcttgccaatcagtttattacgatgcttccctcacaggaaagaccggaacatacgaccggctatgaaggattctatcatttgattggtattcagggggatgtggagcaaagcactgtgtcttatatcatccgcgatcatgaccgtgcaaaatttgagaaccgtaaaaaagagatagaacgtctggtagctcaaatgaacgctgaatatggagctggtactgcgacactcgaactgcgcgaccagtattataatatgcgtgagaaaatagaaccggtaatgcacatcatcgatactgcttttgcagctatggaagccgtgggtgtgaaaccgaatgtaaaaccgattcgtggaggtacggatggtgcgcagctttcttttaagggattgccttgtccgaatatctttgccggtggtctgaatttccacggtcgttacgaatttgtgcctatccagaatatggagaaagcaatgaaagtgatcgtaaaaatagcagaactggtggcttccaaataaaaagacggtaagctccggtaatacttaatacctgatacttaaaacttaatactttaaaataatgaaaaccactccgtttacagagaaacatatagcacttggtgctaaaatgcacgagtttgcaggttataatatgcctattgaatactccggtatcattgatgaacacataactgtttgtcaaggtgtcggtgtatttgatgtatcgcacatgggagaattttgggtgaaaggaccgcaagcgttggcctttctgcagaaaataacatctaacaatgtggcggcactggctccgggtaaaatacaatatacttgttttccgaatgaggatggggggattgtagatgatttgctggtttatcagtatgaaccggaaaaatacatgttggtggtgaatgcttccaatatggaaaaagactggaactggtgtgtttctcacaatacggagggagccgagttggaaaattcgtcggataacatagctcaacttgctatacagggtccgaaggctatttcggttctgcaaaagttgacggatattgatcttgctactattccttattatacatttaaggttggaacgtttgcaagtgaagagaatgtgattatctccaatacgggttataccggtgcgggaggttttgagctttatttctatccgtctgcggctgattctatatggaaggctatttttgaagctggtgaagagtatggcattaaacctatcggtttgggtgcccgtgatacgctccggttggaaatgggcttctgtctgtatggcaatgatctggatgatacgacttctccgatagaagccggattgggatggatcactaagtttgtggagggcaaggattttgtcaaccgtccgatgctggaaaaacagaaagcggaaggtgttacccgtaaactggttggctttgaaatggttgatcgcggaattccccgtcatggctatgaactggtgaatgatgaaggcgagaaagtgggagtggtgacctccggtacgatgtcgcctacccgtaagattggtatcggtatgggatatgtgaaaccggaatatagtaaggtgggtacggaaatctgtatcgatatgcgtggtcggaaattgaaagctgtggtagtgaaaccgccttttagaaagtaaaaaataagcttgttattgtgtatagccccggataagttacgactctatccggggctaacttattttatgatggttattgcaaaacatattcgtaaatatgttgtttatcccatagaaataatataattttgtcatcaaatacgataaaataatgtctcaattacctactcttatagctgacctcgcacttatattgatttgtgccggtgttatgactttgttgtttaagaagttgaaacaacctctggtcttgggatatgtagttgccggatttctggcaagtccgcatatgccgtatactccttcagtgatggatactgccaatattaagacttgggcggatattggtgttattttcttgctgtttgctcttggtttggaatttagttttaagaagattgtcaaggtgggtggttctgccatcattgctgcctgtaccatcatcttttgtatgattttgttgggaataggagtcggcatgggtttcggctggcacaggatggacagtctgttcttgggcggtatgattgcgatgtcgtctactactattatttataaagcttttgatgatttaggattaaggaagaagcagttcaccggacttgtgttgagtatcttgattttggaagatattttggctattgtattaatggtgatgctttccactatggcggtaagccaacattttgaaggtaccgagatgttggagagtatcgggaaattattgtttttccttattctgtggtttgttgtcggtatctatctgattcctgaattcttgaaacgctgccggaaattgatgggagaggagactctgcttattgtgtcgttggcactttgtttcggtatggtagtgatggcggctcatacaggattttctgctgcatttggtgcatttataatgggatctattctggcggaaacaatcgaggcggaatccatagaccggctggtgaaaccggtaaaggatctttttggagctatctttttcgtatcggtcggtatgatggtggatcctgcaatgattgtagaatatgccgtacctattatagttattactttggctgttatcttgggacaggccgtttttggtacattcggtgttattctctccggaaagcctttaaagacggctatgcaatgcggctttagtttaacgcagatcggcgaatttgcgtttattattgcttctttgggagtctctttgcatgtaacgagtgattttctgtatccgatagtggtagcggtttctgtgattactactttcctgactccttatatgattcgttttgccgagccggcttctacttttgtggatgctcatcttccggaatcatggaaaaaaataatgatgcgttattcttccggttcgcaaacagctctgaatcacgagaatttgtggaagaagctaatcttgtcaatggtacgtataacagttgtttattcaattgtcagtatgtcgattattgcactttcttttcgttttgttgtgccattctttaaagagaatctgcctcatttctgggcatcgttgttgggagcggtatttatgattctgtgtattgctcctttcttgcgtgccattatggtgaagaaaaatcattcggttgagtttatgaccttatggcatgatagccgtgccaaccgcgcgccgctggtatcgacaatcgtgattcgtattatgatagcggcactttttgtcatctttgttatttccggattatttaaggcgtctatcggattgattattggagtggctgtacttattgtattgttgatggtatggtctcgccgtttgaaaaagcaatcgatattgattgaacgtcgtttcttccagaatctccgttccagagatgtacgtgcagagtatctgggagagaaaaagccggagtatgccggtcgtttgttgtcgcatgatttgcatcttgccgatatggaaattccgggtgaatccagttgggcgggaaagacattgatggagctgaacttggggaagaagtttggagttcatgttgcttctattcttcgtggaaagaggaggattaatatccccggtggttctgttcgtctgtttccaatggataagatacaggtgatagggacggatgaacaattaagtgtgtttaatgaggcgatgcaaaacggagcgaagatagactgggaggtttatgaaaagagcgagatggctttgaagcagtttatcattgacagtgattctgtttttctgggtaaaacgattcgtgaatcgggtatccgcgacaaatatcattgtatgatagccggtgttgaaagtgaagacggtacactgatggttcctgatgtaaatgctccactcgaagaaggcgatgttgtttgggtggtaggcgaaaaagaggatgtgtaccaattagtcgatcaaaaaaacgaaaaagtacaagccggataagaatggaatacttatttttgcaacgataaaaacttaaaataataatatcatgaagagtgatccgaaagaatgtctgtattgccagaacaatgaaacgttgcataatctgatgattgagtttgcgcaattgagtgtgtcacgtgtgtttttgtttaaggaacaaacctaccgtggacgttgtcttgtttcttataaagaccatgtgaacgatttgaatgaattgagtgatgaagaccgtaatgcttttatggcagatgtagcgcgtgtcactcgtgccatgcagaaagctttccagccggaaaagattaattatggtgcttactcggataaattgtctcatttgcattttcatttagcacctaaatatgtggatggacctgattatggaggtatattccaaatgaacccgggaaaggtttatctgactgacgcagaatatcaggaactgattgatgctgttaaagcgaatctgtaaaaagaaagggcgaactgcaactctataagtggtaagctatacaaatcgtaaacaatgaacggtgagcaagcctgtggatataacgcagtctgttcaccgttcattatttacgattcatcgtttatttatctttttctatttatcctattcttcaaaatcgaaatcaaagtcaaaatcatccataaactctggagttgtaaattcttccagttcccggcgatctttcttggtcgggcgtccggttccacgtgcccggtctacgaatccgctgattttgctcatttcaagtaattcatattgatcgggagtcgttacattttccatcatttccgataccagtttagctcctacacgtttctcaatcggttgtaatactttgaatgagtatgtgataggtggtttcttcacttgaataacatcacccggttttatcatacgggcagctttgaccagcgaaccgttgatggtaatacgtccttttttgcaggcttctgctgcaatcgtacgtgtcttgaagatgcggacagcccacatccatttatctattcttgcttcagccattttagttagttatttagtgataagtaattagtcggttagtggacggtatcattgatcgctaaccgttcattactatctttattttttatagaacgggttcatcatttcttgttgaactggttcattgtgatgtcgataccggcaagacagaaacttttgataatttcccctgccacctccagtctttcatccattgtcttccagtcttcatcagtgaagtgaccgagtacgtaatcgatttgtccgccacgtggaaaatcactcccgattccaaaacgcaggcgggcatagttttgagtgcccagagtggcggcaatatgctttaatccgttatggcctgcatcacttccttttccttttaggcgtaacgttccgaaaggaagagccagatcatctactacgatcagcacattttccaatggaatattttctttctgcatccaatagcgaacggccaatccactcaggttcataaaagtcgatggcttgagcaggatcaactgacgtcctttgatggaaaagctggtggtgaatccatagcgtccatccataaaaggaggagcattgttaattctggccaatgcttctactgtcatgaatccgatattatgtcgggtttcatgatactcgggaccaatgtttcccagtccgacaactaaatattttatcatcgtttttccgtaaaacagttcattaatatagaaagagaaacgcagattaatacaaattaatgcagactgaacatctgctttaatctgcattaatctgcgtttgaagtatatctctttacagggataatctcaattacttgccagcggctgctgctgcacctcttgctgcacgagtcaacttaacagcacatacaacggcttctttagcactaatcagttcaaggccttcgaagctcaattcgccaactttaacagtcttgcccaatcccaggtgagaaacgttaacgatcagtttctcaggaattacattgtacaaagctttcactttgatcttacgcatctgcagtgcaagtttaccaccggctttcacaccttctgcaagaccttccaactgtacaggtacttccattacgataggtttagcttcgtcaatctgatagaagtcaacgtgcaggatagtatcttttaccggatggaactgaatatctttcaggatagcgtttacttttttgccatcgataaccaagtctacaacgtagatgtgcggagtataaactaagttacgaagtccttcgttagtcactgtgaagtgaactacttcattacctccgtaaagtacacaaggtacaccaccgttcttacgaatttctttcaaagctctagcttgttcagaagagcgttctgcaattgttcttgcagttccttttacttcaattgatttcatttctttaaaaaattgtgttactctaaattaagttagcttgcttaattcaccatcacacgatgtggattatcacacgatgttgcaaaaaagcggtgcaaaagtacgtcttttttttgaaatatcaaagagttactttcttaaaagtcaatatcgatcttaatttcgctctctaacttgttttcccgggcttcttcgattgctttctgttcactttcttcatccgcttcggtgttcaggcgggcgatgtattcgttcgcatcactgcactcaatgaagttgactgcttcttcgagtcctgccataaacttctgaaagtcctccctatataggaagattttgtgtttttcgaaactaacctgagaatcgtcaccttctcccgttatcactttcttactctctgtaatagccaggaacatttcatctttacgattcttctttacgtcaaggtaatagatgcgtttacctgctttaatggacttggagaatacaatctccttatcattcatgtctgcgctcattttcttttttaaatcttccatatctttcggtccgtttataatcggcctcaaaattggatattttttttaaactgtcaaaagaaaaagcgcagagaatcaaatactgcattaaaaaatgtgatttattagtggaaactcattaaaaatatctacttttgcagttcgataacaacagtattaatttgaattatgatcaacagagttcttattcgtcttaagattatacagatagtatatgcctattatcaaaatggcagcaaaaatctagactcagcggagaaagagttattctttagtctttcaaaggcgtatgacctttataattatttgctaatgctgatgatagcattgacagagtatgcacaaaaacgtattgatgcggcaaaagctaaattggcacctacgaaagaggagttgtatcccaacaggaagttcgtagataacaagtttattgctcaattggaagtcaataagcaattggtagagtttatagccaatcaaaaaagaacctgggcaaacgaccaggacttcatcaaggaactttatgagaaaattgtagaaaccgatatctataaagattatatggcttctgacgaccactcatacgaggccgatcgtgaattatggagaaaactctataaaacatacatctttaataatgattctctcgatcaggtattggaagatcagagtctgtattggaatgatgacaaagaaattgtagatacattcgtcctgaaaacgatcaaacgttttgatgaaaagaagggtgccaaccaggaactgcttccggaatttaaggatgacgaagatcaagagtttgcacgtcgtctgttccgtcgtactattttgaattccgactattaccgtcatttggttagtgagaatacaaaaaattgggatctggaccgtattgcatttatggacgttatcattatgcagactgcattagcagaaattcttagtttcccgaacattccggtcagtgtttcgttaaatgaatatgtagagatagcgaagttgtatagcacagctaaaagcggtagctttatcaacggtacgctggatggaatagttaatcaattaaaaaaagaaggtaagttgactaaaaactgatacctttgtccatatagtagaaactaaaacagattatttatgaacgtattgactgtattattgcaagctcctgccggtgctgccggaggtggaagtatgatgtggatcatgctgatagctatgtttgttatcatgtatttctttatgatccgtcctcagaataagaagcaaaaagaaatagcaaatttccgtaaatctcttcaggtaaatcagaatgtgattactgcaggtggtatccacggaacaatcaaggaaattactgacgattacatagtacttgagattgcttctaatgtaaagattaaaatagacaagaattctattttcgctgatgcttcagctgctagcaatcaatctaaataatagttgataaataagtgcctatgtttgatcgtaggaaaatagaatatacatatttaaaactatcaaagaaaattaaggattttctgctcagtgataagagcagagagttcttaatttttttatttttcttcttgatagccggtggattttggctgcttcagactctgaatagtgactatgaagccgagttctccattccggtacgaataaaagatgttcccaataatgtagtgctgacttcggaaccgccttccgaacttcgcgtcagagtgaaagataaaggtacggtgctgctcaattatatgctggggaaaagttttttcccggtaaatctaggttttcttgattataaaggaaaagataatcatgtgaagatttacgcatctgattttgagaaaaagatattgagtcaattgaatgtgtcttccaaaattctttcaatcaagccggatacattagagtatatctattctgaaggaaagtctaagttagtacctgtccgctttcaggggaaagtgacagccggacttcaatattatgtatcagatacgatttgtaatccggattctgtattagtttatgctccggaaggaattctggatactatcaccatcgcatatactcaaaagataaatctggagaatatttcagatacaacccggcgacgaattccgctgaattctgaaagaggagtgaagtttgttccggcttcggtagaaatgatatttccggtagatatttatacggagaaaacagtagaggtgccattacacggagttaatttcccagccgataaggcattgcgtaccttcccttccaaagttcagattacttttcaggtggggttgaagcggtttcgcagcataaaagcaagcgattttatcatcaatatttcttatgaagagttgttgaagctgggttctgataaatatacggttaaattgaagtcgttcccaagtggaatcaatcaaatccgtattgttcctgagcaagtagacttcttgatagaacaaattacttctaatgtcgattaagattggtataaccggtggtatcggtagcgggaaaagtgtggtttccagattatttggaataatgggaattcctgtttatatttcagatatagaagcaaagcgtatcacgcagacagatccggtgatttgtcaggaactttgtgcgctggtcggtcaggatgtgtttcaaaatggtgtgttgaatcgttctttgctggcatcctatatgttcggtcatccgaatcgtgtgcagaaagtgaatgaaattattcatccacaggtgaaagaagattttcgtcggtgggctgcccggtttggtggtgaacaattggtaggtatggagtctgccatacttgtggaagccggttttaggagtgaagttgattttctggttatggtgtatgcgccgctggaagtgagagtggagcgcgccataaaacgggattgttcatcgagagaacaggtgatgaagcgtattgaggcacaaatgagtgatgaagttaagagaagtcatgctgatttcgtgatagtcaatgatgatgaaacatcgttaattccgcaggttttggagcttatttctttgctatctaaaaataatcattacctttgctccgcaaaaaataattaataaataaaaggatatatactatgttgaagactatcttgtctatctcaggtaaaccgggattatacaaacttatttcgcaaggaaaaaatatgttgattgttgaatcagtcaatgctgagaagaaacgtttccccgcttatggtaatgaaaaaattatttctttggccgatatagcaatgtatacggacgatgcagaagtgcctttgtatgatgtgctggaagctataaaagagaaagagaaatcagcgcaggcttctatcgacccgaaaaaggctactcctgaacaattgcgtgaatacttggctgaagtattaccaaactttgatcgtgaacgcgtatatgtagcagatatcaagaaattggtagcttggtataacattttgatttctaatggaatcacagaatttaaaccggaaggtgaagttaaggaagaagcagctgcagaataatctgtaccgtttatttaatcaaaaatagagaacatgataagcattttaaatgcttatcatgttttttcgtataaacacttgtatgttcagaaaaaaattagtattatttgggtaatcttttactaaaataaatatcttctacttatattgtaaataatgatgcttttttatgtatctttgtcgctgttcactattcttgggaatagcagtagtgaacggtgaataacaatagagaacaaaagcgttataaagatattattcaagacttgagatctggacaatattgaactacttaggaataatgtttaaacgctcgtgttctgccatgtatgtaaatatgtggttgaacattagttgttttgcatgatttagctagtagatgtctaaagcgtcaaggggggataattgtagtaagttcccacgctttttatttttaatagccttctaggggagcagatggtttttgatgtagggtatggagacaataacaaataaagaagtaaacgtccgtttggacaatgaaaaagggacattatgcctgacaggtttgttggcaggtacaatggtattcctttacgattcacagggagaattaaaaggcaaacataaatttgctttgcctttattgactatggaaatccctcaacagggtacctatgttttggtaatgagccatccgaattgccaaccggaagtccggagatttacatattcagggatataaataataccggtatgcttcttatcaagcataccggtattctatttaaatggaaactcttaatttctgaataccaatccgtctccaccagcgtcaacggtaattgctttactgcggtcgacttcctgggaaagtaactttttggatagatcgttcaatagataacgttgaatagccctctttaccggacgagctccaaattcaggatcatatcccacttgagataagaagtccaatgctccttccgtcagtttcagttccactccgttttcggcaagcattttctgaactcccttgatttgtaagagtacgatctgcttgatttccttttcattcaatggtaagaacatgatcgtttcatcaatacggttcaggaattccgggcgaatcgtctttttcaacatattcatgacttccttcttcgtttcttcaatcacttcttctttattggaaccgtgcaacttctccatctgactttgtatataagaactacccatattcgaagtcatgatgatgattgtatttttgaagttgaccacccttcctttattgtcagtcagtcgtccgtcatccaatacctgtaacaggatattgaaaacatccggatgagctttttctatctcgtcaaacaggacaacagagtaaggtttccgacgtatagcttctgtcagctgaccgccttcatcatatcctacgtatcccggaggcgctccgactaaacgggaaacactgtgcttttcctgatactcgctcatgtcgatacgagtcatcatcgtttcgtcatcgaacaggaattctgccaatgccttcgccagttcggtcttacctacaccggtggttccgaggaaaatgaacgagccaatcggacgtttcggatcctgtaatccggcacgactacggcgcacggcatctgccacggcttcaatcgcttcatcctgaccgattacacgttgatgaagttcctcttccaagtgcaatagtttatccttttcactttgcagcatcttgctgacaggaatacctgtccaacgggaaacaacatccgcaatgtcctcagcatctacctcttccttaatcatggctttatcgccttgcatatcacgtagctgcttttgagtatcttctatctctttgtccaaagcctgaagtttaccgtaacggatttcggctactttaccatagtcaccttcacgttcagctttttctgcttcaaatttaagattctctatctcaaccttattctgctggattttatccatcagcgttttttcactctgccatttggctttaaaggacttttcctgttctttaagttcggcaagctccttaccgatgatttccagtttcggtttatcgttttcacgtttaatagcttcccgttcgatttccaactgcttgattttgcgggagatttcatccagttcttcaggaacagaatctacctccatacgcagtttggctgcagcttcatccatcaggtcaatggctttatccggcaggaaacggtcggtgatgtaacggctactcaattcgacggctgcaatgatggcatcatctttgatacgcacatggtgatggttctcgtaacgctctttcagtccacgaaggatagaaatagtacttaagttgtccggttcatccacttgtacgatttggaaacgacgctccaaagctttgtccttttcgaagtacttttgatattcgtcgagggttgttgctccgatagaacgtagttctccacgagctaaggcaggttttagaatgtttgcagcatccatggcgccttcaccctttccggctcctaccagtgtatgaatctcatcaatgaacagaattatatcaccttctgatttcttcacttcattgacaactgatttcagtcgttcttcaaactcacctttatactttgcaccggcaaccagtgctcccatatccaatgaatagacctgtttgtttttcaggttttcaggtacatctcctcgaaggatacgatgtgccaagccttctacgattgctgtcttaccagttcccggttcaccgattagaatcggattattctttgtacggcggctcaatatctggagtacccggcggatttcttcatcacgtccaattacaggatccagttttccgctacgggcagcttcgttcaggttgatagcgtacttttccaatgattgataagtatcttcactagattgtgacgttactttttctcctttcctcaactcgctgatggcattgcgtaattctttttccgtcataccggcatctttcaagatagtggagacggtacttttcacagtcagcaatgctagtatgatatgctctaatgaaacaaactcatcgcccatttctttagaatactgtgttgctttctgcaatacttcgttagattcacgactcagatacggttctccgccggatacttttggcagggagtcgatctgtttgtcgacaacaagagctacctgctgtccgttcatgccaagtttctggaagatgaagttagtgacattttcacccaccttcattactccctgcatgatgtggacaggttcaatggcttgttgtccccggctttgtaccaggttcacggcctcctgtaccgcttcttgagatttgatggtaaaattgttaaagttcatatctttgttctcctttcttatttcacgtttttaataacacctaagagggcgcaaaagatttgccaagtataaaaatatgacaaaatagcatgagtattaaggagttaaaggacaaaatgacctttttatctgggagtaactgacgaatttgctataaaatatcatttgttacctgatacgcttgtttgtgtaatcttagcctgtgatgaaagaaaataaatattgaaaagtggataaataaaagtattgtagtatctttatccgctgtaataatatagatggtatatgagtgataagccccaaataaaacttgctgaaacagtggtgttgattgacgctgcttttttgaattttgtaataacggatataaaaggatattttgaagaaactttgcatcgttctttacaagagatagacctttcgatgttgaccacctatataaccttggatgcagggattacagaagggaagaacgaggtgcaatttctttttgtgtatgataaagaatccagtcgattgcaatattgccaaccttccggtttgcaggaagaattgaatggagttgcgtttcagagcccttatggtgaatattcttttgccagcgttccatcggaaggaatggtgtcaagagaagatttgtttttggatttactctctatcgtttccgattcggcagacgtgaaaaggatgatcgttatttctttcaatgaggagtatggaaagaaagtgactgatgctttgcatgaagtgaaaggcaaagaggtcattcaattccgtatgaatgagcccgaacttccggtggattataaatgggatatgctggctttccctgtcatgcaggcgttggggataaaagcggaagaattgcaataactattgtgcttttattctttctgtaattcattattcgtcattgatttcttaactgttaatcataattgccgtgtccgattttcgtttaaaagtatttcagagcgtagcgaagaatctaagctttacgaaggcttcgcaagaattgtttgtcagtcaacctgctatcaccaaacatattcaggagctggagacttactatcaagctcgtttgttcgaccgtcaagggagcaaaatctcactgactaaggccggagaattgctgttgaaacatagcgagaaaatcttggacgattataaacaattagaatatgagatgcatctgttgcataatgaatatatcggcgaactgaaattgggggccagtactacgattgcgcaatatgtacttcctcctctgttagcgaactttatagccaagtttccgcaaatcaatctttctttgattaatggaaattcccggggagtggaagctgccttgcaagagcatcggattgatttgggactggtcgaagggatcttccgcttacctaatctgaaatatactccatttttgaaagacgaactggttgccgtggtgcatacacagagtaaattagctgtcacggatgagattactccggaagatttgctgaatattcctttggttttgcgggagaggggctccggtacattagatgtgtttgaacgtgccttattgcaacataatctcaaactttcttctttaaatgtattgatgtatctcggtagtacagagagtatcaagctttttttggaacatacggactgtatgggaattgtttctatccgttcggtgcataaagagcttgtagctggcaatctccgtgtagtcgaaataaaaggaatgccgatgctgcgcgaatttaactttgtacagctgcaagggcaggagggaggattgtcacaggtgtttatgcgtttcgccggacatcatagtaaaagcctgtaagtttgtctttttctctcgtgcaatcgcttctccagaataagaaaaatgattttcatttctcatattctcataattattttataataatcttataaccaggtaattactgaatgagaaacgttttgagaaagcctatttctcatagtttctttagtgaaataggcctcaaaacagttatttctcatctattttcggggtatttctcatactgttatcctcttcgttcgactattttttctttatatataccctgtgtgctcctcttcctgtgatttctattccagaatccggttgatgtccccactgtcttagttcgttggttgctgctgtttgcaacaatcctgttagtttgcgatattcccaaacggtcaggaagggatgttcatccagatactttagagctaatgccagtcgttgttccgatgtgaatttattagaggatcgttgctttttccagggtgctctttccagttggcatctttcgctgatatttctcaccatttctcggtctacccggaaatttacacctcctataaagatactttgtgcgttgcgatgactcccaccttcttccggatcttcccgctccttgtctctgcctaaagtaagagagggagtaaacgttcctattccgtctatctttaccgagcgtccttctgccatcaaatgcgccatttcaatggcggtctgaagtagtacgccttctatgtctcctgcactgaatccactgacgtcgccaactcgttgcgccaactcttttatgcttgtattatctatccgcgcaaatttaggataagtaattcttttgcctgttttctgaagatcgggcatctcctctatgatatatcttgccatatcatctattgtttaaagtattaatagataagttcttttgtattagaggcaaacttcctttcttctaatagtaaagttccttttgattaattataaactataaatgcaacttttgtttttataattgaagcttacgtttataaaaacaaagctttcatttttataatcaaagcttgcatttatagtttactcttatacaaaggtaagttttctatttgacaaaaagaagtttatccttaataaagaagaaattttctattaatagtttgggagggaatgaagatgattgaagagaaagggtataacgggattttatgcttaatatattatttcctaaaaagtggatgcaatgcttctgttagtttttagaaaagtgtatatttgtaatattatgagtcatactaatatcatgcaagccgaagaaaatgatttggtaaacattttatctttgcaaaagaaatcttttatggtggtggccgaacgaatgaataaattcgatcttccccctttgttgcaaaatcaggatgagatttgtgatgagtatcatacaggcattattctaaaatacgtatcagatgatggacagattgtaggttctgtcaggggacgtatggatgaaaatagagtatgtcatattggtaaattgatagtgcatcccgattttcagaataaaggtataggtagagaacttatgactgaaatagaacggttatttcctcactgtcataagttttctctttttacaggcgaagagacacccaatactttgcatctatatagcaaagtcggttataatattgtatgtagaaaagaaatggagggtatcagcatgattattatggaaaaagaaaaacttacttatagagattttacgtttgacgatttagaaactgtttgtaaattacctcgaaacaagcaggaactgttttttatgtttcctaaagctgattttcctttaacaatcaatcaatcaattaaagaatacaataaaagatagatttgattcgactgttgttttatttaataatgaagtagtagggtttgcaaacttctatgaggtaagagaatctcaatattgtgctattggaaatgtaatagtaagtccttgttttcgtaatcgtggcgttggcacatttctgataaatgctatggaagatattgggaaaaagaaatataatgtatcggagcttcatttgtcttgttttgatgctaatacgagtgggcttctgttatatactaaattaggatataaaccctatgaaatagagaagtacattaataaggaaaacgaagtctcggctttaatagaattgaaaaaagtgctgtgattcgaaataaatcacttatttgattctgttatctcctgaaagtatgataacttaaaaaaatgcgagaagtatctatgactaactataacttacaacgatttttagatgcccagcgaggtgattatgaacaagcccttgcagaagttagaaacgggcggaaatattcccattggatttggtatatatttcctcaactgaaaggattgggcatgagttataattcacagtattatggtcttagcggcaaagaagaggctgaagcatatcttgcccatccaattttgggagaaagacttcgtgaaataacgtctgtttttcttcaattgaaaaataaaacggcgcaggaagttttcggttcgttagatgcgatgaaagtattgtcatgcatgacgctttttaatgaagttgcttcggatgatttgtttcagcaagtgatcgaccattattatcagggtaaagtggatgagacaacaaaaagaaaattggaataataactaatactattttatatgggctgtttaatgaatctattgtggttgctgcttggtggtatctttactgctgtcgaatacctcatttcgagtttattgatgatgctgaccattatcggcattccttttgggatgcaaacattgaagttggccggacttgctttatggcctttcggtaaagaagtcagaagtgggaaccgttccggtggctgcctctatatattgatgaatatcctgtggatatttctgggtggcatttggatctgtctgtcacatttggttttcggggctatattgtgcattaccattatcggaatcccttttggattgcaacacttcaagttggcatctttggcattatcgccttttgggaaagacattgtaacagtgtaagagtagttgggagagagtatgcctataattaaaagttataatgcataattagaaactattggtgggtcttgattgtttaccgtacctttgcacccggaaaacgattaaagacaaaaagatatgatttcaacagctacaaaaactttgcaggcaaataataagatgatttatattgcgctgctttccactctgactttcttcctgtttttagactatattccgggattggaagcatggtcggcttgggtaactcctcccgttgctttgttcctcggacttatttttgcattaacttgcggacaagcacatccaaagtttaataagaaaacatcgaaatatctgttgcaatattcagtagtaggattgggattcggtatgaaccttcattctgctttagcttccggtaaggaaggtatggaatttacggtcatttcagtaatcggaacattggtaattggctggttcatcggacgtaaattgtttaaaatagatcggaatacagcttatcttatcagttcgggaaccgctatctgtggtggtagtgctatcgcagcagtgggaccggtgttgaaagcgaaggacagtgaaatgtctgtggcattaggtacaatctttatcctgaacgctattgcacttttcattttccctgccattggtcatgcattgaatatggatcaacaacagtttggaacatgggcagctattgccattcatgataccagttctgtagtaggcgcgggagctgcctatggtgaagaagcattaaaagtggctactactatcaaattgacccgtgctctttggattatcccgatggcttttgctacttcctttattttcaagagcaaaggacaaaagatcagtattccatggtttatcctcttcttcgtattggcattggtggtaaatacttatttactggatggagtgccacaattaggagcagctatcaacggtattgcccgtaagactttgacgataactatgttcttcatcggtgcttctctttctattgatgttttgaaagccgttggaattaaacctctgattcaaggaatattgctttggataattatcagcttgagtacattggcatacatttattttgtataagggataaaagagagaatgatataaaaaagaaaaaggtgggagaatgatcgtaaacgactttctcccacctttgtttacttagctttcagcctacggataaacagatctaaagctatttatttcttcttcaattcttcaaaaatcagtccttccagttcttctgccaattcaggattatccataatgcattgtttagcggcatcacgcccttgtcctaacttagtatcgttgtagctataccatgaaccgctctttttgatgattcccaagtcagcacccaagtcgatgatttctccggagtgggagataccttcaccaaacatgatgtcaaattcagctctgcggaaaggaggcgctactttgttcttcactactttcactttggtcagtttaccaagaatctcttcaccatctttgataggttggctaccacggatatccaaacgtacggaagcatagaatttcaatgcgttaccaccagtcgttgtttccgggttaccgaacataacgccgatcttctcacgcaactggttgatgaaaatacaagtcgtacgtgtcttgctcacagcagctgtcaacttacggagtgcctgagacatcaaacgtgcctgaagacctaccttattgtcacccatgtcaccttcgatttccgctttaggggtcagtgcggctacagagtcgataacgatgatgtcgatagcagaagaacggatcagttgttctgcaatttccaaagcctgttctccgttgtccggttgagagatataaagatcatcaatgttcactcccagtttagatgcgtagaaacggtcgaaagcgtgttcggcatcaataaaagcagcgataccgccggccttttgtgcttcagcaatggcgtggatagccaatgttgttttaccggaagactccgggccatagatttcgatgattctacctctagggtaacctccaacaccaagtgccacgttcaaggcaatagagcctgtcgggatcacttctacttgttcaacactatcatcacccattttcatgatagaacctttaccgaagctcttttctatcttttccatggcagcctgtaaggcttttagtttttcgcttgatgccattttattatctgtttcaaaattaagttcatctttctttgccataccttattcttatataattaatggagttattgatttaaaatctgtgaggcatgttccttggtcttcacttctttgggagtgataatccgttctacgattccttcttcattaatcaggaaagtagtgcggaaagtacccatgtaagcacgtccgtacagtttcttttctccccatactccaaactcttccactaaccttttgtcagtgtcggcaatcagggtaaaaggaagattgtttttttcgatgaatttctggtgcgacttttcattgtctacgctgacaccgattacttcatagccggctttacgtagttcggaatagttgtcgcgcagattacacgcttgtgcggtgcaacctgatgtactgtccttcgggtagaagtacaacacaatcttttttcctttataagcacttaaacggatttcttcgcctttttcattgatgcctaagatttccggtgctttatctcctacgtttatcataactatctttttaatgaataagtctactcttataattccagatttttgtcgaactcttcatgccagggaagaccttgcttgttgagttgttccataaacggatccggattgaactcttctacgttgtttacacccggacgcttccactcacctttgaagaacatcatggctccgatcattgccggaactccggtggtgtagctcactccttgcatacctgtttcccggtaagcttcctgatggctgcaattgttgtatacataataagtacgttccttgccatctttcaaaccgcggatacgacaaccaatagaggtttctccttcgtagttttctcctaaatcctgcgggttaggcaatacagcttttaagaattgcagcggcacaatcttcactccgttgtaatcaacttcgtcgattcgtgccataccgatgttttggataacgcgtaagtgagttaaatactcttgtccgaaagtcatccagaaacgtgcacgtttgattgtcgggtaatgtttcaccaatgactctagctcttcgtgataaagaagataagaatcacgcggaccgatgttcggatatgtcaggtctttatgaatttccagcggaccggtagttacccatttgccattttcataatagcgtccgttctgcgtaatttcgcggatgttgatttccggattgaagttcgtagcaaatgctttatggtggttacccgcattacagtctacaatgtccagatattgaatctcatcaaaataatgtttagctgcataagcggtatagatgccacttactcccgggtcgaatccgcaaccgagaatagctgtcagacctgcttctttgaagcgatcgtgataagcccattgccaactgtattcaaagtgagcttcatccttcggctcgtagttagcggtgtccagatagttcactccagctttcagacaagcttccataatagtcagatcctgataagggagagccacattaatcaccatttccggtttgaaatcgttgaataaggctaccagctcatctacattgtctgcatcaactttagctgtttttatattggggttacctattgcctcgacgattttatcgcatttctctttcgtacgactggcaatcatgatatctgtaaatacatcggcattttgtgccactttgtgcgcaacgacagtgccaacaccgcccgcaccaataataagaactctacccatttcgttaattgcgaattaaaatattaagaatattggaattgttagctttgcaaatatacgtgattattttcagataatcattcgcagctacccctttttatttgtaacgctgcaaggttccattttcaaattccagtgttttgccattgtaaaaccaagtttcgaaacgattgtctttttttagctcgatttctatcggatcaccaatggacaaacggcattccactgtactcatgcccgtctccagatctccccgggagataatctgccaacgattttctgtgatacccggatattttttatgtatatcttcgaatccgaaaaagtcttcgatataattttcatttctgacgataacatcatatttcagatcggtttccaattcatagatcgctccgtcattgtcttttaatgaaagaatagccagactgccgggaggagataatctaatatctttgatttgcagaactgtatatcggggcaggtgaacgcgtgattcggtctgcttgtcttcaaatgatatgattcttttggctggcagcacctttttaggataaactgtcattcccatatatttatttttcaggctttcgatagtgcctagactcttattggtgaaactgaatgcatttgagaaatatttcattctcttttctccttgaaaatcattcaggtccatgccggagtttgttcgtgagagggcaacttccagataataagaatgtccctgcgtatctttgaatacgatttttgccggatatgcctgactgccgactccgatagcggtaatcgttgcttccgtattgacgggaatggctatatcccggtagccggaataattgttggcatcgtctatccggacactttctgcttgtatatagactgtttttcctaccaacagctctttagcagtatccacatccttcaaataaaccaatccgttgatgccggcacggggagccttttcggagatctcctccagccgcatattctttatctcataataatattttcctccctcacattcgaagatgaagcgagtggagtagttagtcccgttggggatattctgagctttctcttcagttcccgtgaaagtgagtattttatgtttcagcaggctgttgtctacccctttctcggtctcgtagctggaaagggtgggaaggaacatgctccgtggagatggaacgaacataaatttcattccgggtgtccatttgcccagcggtagcaacggaaagttacttttgataaactgttcttcttggcctacagggatttcctgtgcagaaggagtagtgacgatgtaatcactttgggctatgataggagacgtaccacagtagaatagaatcaaagacaggacaattattctcatatttgtttactttaagtgaactatgtaaattgttcgtttgttgtacatttactggcaaatgtatatattttatgttgcattggatgttattttccaatctttttgatatctttgccctcgattttaacttaaacgttataacaatatgaagaaagtatttgtttcaatttgcattgctggtgcagcacttgcaatgtcttcgtgccgttcggttgagaaggcaatttccctgtcgtctattaatggtgaatggaatatcatagaagttaatggctcgaaaatcactccgggcgaaagtaaatcccttccttttatcgcttttgatacagcaaccggtcgtgtgtccggcaatagcggctgtaatcggatgatgggtagcttcgatgtaaatgcgaagccgggaagtcttgaacttacaggaatggctagtacccggatgatgtgtccggatatgactactgaaaataatgtattgaatgcttttgcgcaagtaaaaggatataagaaggcaggtaaggacaaagtgtatctttgcaattcgtccaaccgtccggttgtcgttctacaaaagaaggaggctgatgtaaaactttcggttttgaatggagaatggaaaataaaagaagtgaatggtgaagcaattccttccggaatggaaaaacaacctttcattgcttttgatgtgaagaaaaagacaattcatggcaatgccggatgtaatttgattaatggcggttttgaaaccagtaccagcaatgccaaatcaatttcttttccgggagtagcgagcacaatgatggcttgtccggacatggaaacagaaggtaaggtgctgaaagctatcaatgaggtgaagtcattcgatgtgttgtccggtggcggcattggcttgtatgatgcaaatggcgcattggtcatcgtgctggaaaagtaataaatagatcaatctatataataggatatgcctgtgtcgcacatgacgacacaggcatattttttttctttcatcgaaccagagtcgtctgtatttgtttaaagaaacagttgctgactggctttgaatatgactatgtcagcagtgtttatttattaaaactgtctttttggcagatattatgtcatgcattcgtataatttctttttggcacacggtttgctttttagtaagcgtccgttcgcgacgaggctccttgataagagccggagaaacaaccggacaaaaagaaatcaatgaataaataataaataaaaaaataacgatcatgggaaaaattattggtattgacttaggaactacaaactcttgtgttgccgtattcgaaggtaacgaacctgtagtaattgcaaacagtgaaggtaaacgtacgactccttctgttgtcgctttcgtagatggcggtgaacgtaaggtgggtgatcctgcaaaacgtcaggctattacgaaccctacacgtacaatcttctctatcaaacgtttcatgggtgaaacttgggatcaggtacagaaggaggtgactcgtgttccttataaagtagtgaaaggtgacaataacactccgcgtgttgacatcgacggacgtctgtacactccgcaggaaatctctgctatgattcttcagaaaatgaagaaaactgccgaagactatctcggtcaggaagtaacagaagcagtaatcaccgttcctgcatatttttccgactctcaacgtcaggctactaaggaagccggacagattgccggtctggaagtaaaacgtattgtaaacgaaccgacagccgcagctcttgcttacggtctggataaggctcacaaagatatgaagattgctgtattcgaccttggtggtggtacattcgatatctctatcctcgaatttggtggtggtgtatttgaagtactttctacaaacggtgatacccacctgggtggtgatgacttcgatcaggtaatcatcaactggttagtacaggaattcaagaacgacgaaggtgctgacttgactcaggatccgatggctttgcaacgtctgaaagaagctgctgaaaaagctaagattgagctttcttcttctacaagtacagaaatcaacttgccgtatatcatgccggtaggtggtgtgcctaagcacttagtgaagactttgactcgtgcaaaattcgaatctttggctcacgaattgattcaggcttgtcttgaaccatgtaagaaggcaatgagtgatgcaggtttgaacaatgctgatattgatgaagtaatccttgttggtggttcttcacgtattccggctgttcagaaattggtagaggatttctttggcaaggctccttctaaaggtgtgaatccggatgaagtagtagcaattggtgctgctgtacaaggtgctgtgttgacagacgaaatcaaaggtgtagtattgttggatgttactccgttgtcaatgggtatcgaaacactgggtggtgtaatgactaagttgatcgatgctaacactaccatcccggctcgtaagagtgaaacattctctactgctgccgataaccagacggaagttactatccacgtattacagggagaacgtccgatggctgcacagaacaaatcaatcggtcagtttaacttgacaggtattgctccggctcgtcgtggtgttcctcaaattgaggttacatttgatatcgatgccaacggtatcttgaaagtatctgcaaaagataaggctaccggtaaagaacaggctatccgtattgaagcatccagcggtttgagcaaggaagaaatcgaaaagatgaaggctgaagctgaagctaatgctgaagcagataagaaagaacgtgaaaagatcgacaagctgaaccaggctgacagcgtaatcttctctactgaaaatcagttgaaggaattaggtgataagttgcctgctgacaagaaagctccgattgaagctgctttgcagaaattgaaagatgctcacaaggcacaggatttggctgctattgatactgctatggcagaaatcaatactgctttccaggctgcaagtgctgaaatgtatgcacagagcggtgcacaaggtggagcacaggctggtcctgatatgaatggtggtgctggccagcaagataacagcaagcacggagataacgttcaggatgctgacttcgaggaagtgaaataaaatcgctgaataagacgattgaaataatagaaaaggggttgaaagtcatagactttcaacccctttttttttgaatgactattattctatatcggaaagttcaaaaaaaagtccgtacgtcttttttttagggcgatttgtcgaataaattttctggtaatgaaaatgtagcttatctttggtataacaaaataacatgtaatgggtatgagaacaatttatcttctattatttcccttgtttttgttttttatagtatcctgtactgaagatgaagtagatcctaacttttcgatagagaatgtcggagatgtcgtgatgggttcggctaaaggttctcaggtaacaatcagttttacgagtacccgtgaatggaaggcgagtacagttgcggattggtttacaatcgctccggtttcgggagaagcgggtacgtgcaatattacgcttactgctatcagtgagaatgtaacaggaaatgtacgtacagcaacacttacattaacttctgggacattgacgcaagacattaccatagagcaggaatcggcagaatttgtgaatctcgagcagaatatatataatgtgtctgttgaaggtggagaattggatattagattctctacgaatatagctgaagatgaattgttgatttatggttctttgggtactggcacttggctgacacaggagacaaaaactcgtgcatcctcttcctacatgcttaacctgactgtattgcctaatactgatggtgtttcccgtactgcctatatctactttgtgaaagtaactgatatggaatcaatcgtagtagagatggttactatcatacaaaggggggaagtggctagtgaatctactgattattcgtcagataaaaaagtacgtgttctgcaaacagcaaagttgggaaaagggcttcctattgtgcttatgggcgatggatttatagatactgaaattaacgatggaacttatgatgcggttatggacaaagcttttgagaatctttttacggaagaacccatcaagtcacttcgagattattttaatgtatatgcagtaactgcggtttcgaaacacaatatttttggtacaggatatgaaacagcgcttggttgtgaactggcgggtggaaacagtacggggatttccggtgaagataatgctgtacaacgttatgtacaatgcgtggataatatagatatgagtgaaacattggctgttgtaattctaaattctcctgcgtatgcaggaactacttattttggttatactaatcagacgaaagtggttgagtttgctattgcttattgcccggtgatatacgatttgcaaagtgaaagtttcaggcaggtacttgtacacgaggctgttggacatggttttgccaaattggaagatgagtatgcttatcaggaaaatgggactatttcttctaaagaaataaaaaatgtacagtatctgcagacattaggatgggcgcagaatgttgattttacatccgatccatctcaggtactttggtctgctttcttgaatgataatcggtatgtgtcagaaaaactgggagtatttgaaggggcatgtacttatataaaaggggcgtatcgtccttcggaagagagtatgatgaatagtaataccgaggggtttaatgctccttcccgtaaagcgatatatgataaaataatggaaagaagtttgggtaaacaaatgtcttatgaggagtttgccgtatttgatttacagaataaatcacaaacgcgcagtgctaaaccaactgtaggaccaagtaagctattcacgcgtcctcactttgtaaatagaatgttagataagtaaagcagatgaggctgaacttcaagtttagttttgagttcagcctcatctggattttatatgtaacgtatttattttgaatcagaactttattgcagtatacagcctgtacaaaaacattaaagctgttgtattgggtgtactttacttttgtattccattctggcttagatacaaattacgttaagtacagtatttctctaatcttttcccggttgcctacaatccagacgagatctcctaattggaaagttgtgtctttatccaaggtaatcagttcgtcatttcgttcaatagctacaacaatgctatcatgcttctctcctaaatgagactgagcgatggtctgatttaaaaagcggaattcttcgtctaccgtgaaagagtggagagttatctttttatccactgcatccatatctgatgtattttttacatcttctattctatttctgaattcctgtaattgcgtatctgtaccaactactgtcaatttatcctgcggatatatgtgttcagagcttttcggtatatatatgttcagatcgccacgagtgatcgcgacgacatttactccaaaattttgcctgaatgaaagttctcctaaagacttgccgatgtaatcggaataaggcgatacgaggatagatgtcaagtcaaggtctttatcattgaattcgctattgaaacttgtttttagcgggtgccgttttttagctacctcttcccgtcggttaagattggcaaggaatcttgtttccaatcgtgaatattgcgtgaggtcttccctaagaataagaatcaatgctactacggctatggcaataatcacacttattccccagtttagtttaaagtagctgatgactacactagtgataaagaaaagagcaacagatacacgtcccagaaccagggaaaccaggcgtccgtgattgtaattctcgtctctccatagcttcaggaataattccgaagagttgtatttgttggagatgagcgcccataaaaaaggagtcataagcagaagagtacccagacacatcaccagtttgatccatatagtgataggagtaaacatttcgctgatggcgggataaatgatttgtatcgacagcagccaaatagcagtgagcagtacgctatagatgacaactctcccaatcatgttttttagtaatttcttccagtcactatcgtggttcatggtcttcttgccggaagcataacgatctaatgtctcctgtactttagtaggcaatattttgtaaagccattcggcaaaaggattggctaaacggataaagtaaggagtcgtgaaagtggtaataacagatacagccacaatgataggtgaaataaacggatcaagcactttgagcgaaacacccagtccggcaataatgaaagcaaactctccgatttgtgccaggctgaatccggatttgatggaagtgttcagtggttctccggataagagtacgccaaacgaagagaaaatggctttgccgataatggtaaccagtgtaatgatgatgacaggccaggcgtattctaccaatacagccggattcactagcataccgaccgaaacgaaaaagatagctccgaagagatcttttaccggttgtatgatatgttcgatatgttcggcctcgatggtttcggcaaggatagatcccatgataaatgctcctagcgctgttgaaaaacctgtgtaagtagccaataccaccattcccagacaaagaccgagagagacaatcagaagagtttcgttattcatcaacttctttgcttttttgagaaaggccggaataacgaagatacctatgagaaaccacaggattaaaaagaaaacgaccttgagcacacttatcagcaaatcttcacccacaaagtcttgactcactgccattgtggaaagaagcaccatcattaagatagcaatcaggtcttccactaccagagtaccgaatacgataccggtaaaacgttggttacgcaattccagatcattgaaggctttgataatgattgtagtggacgacatagacaacattccccccaggaaaatggaattcatagtgccccatcctaataattgtcccaccaaatatccaatgagcaacatactgattacttcggtgatagccgttataaaagctgtggaacctacattcatgagcttcttaaaactaaactccagtccgagtgcaaagagcaggaatataacacctatttctgcccatatattgatattctcaatatctcctactgtagggaaaatattaatataaggacctgccagcaatccggcaataatgtaacctaagactaaaggctgttttagccatttgaacaacaaggttatgatactggccgatattaatatcagcgcaaggtcggcaatcaaagttggcaagtgtgacattagatgtgggtttatttattataacattcctgatagataatatgtttccatctataaaaagatggaaacaatataataaatagctgcagctaagagtccactgactggaattgtaagaatccaggcagtcatgaggctttgggttactccccaacgaacggcagagaggcgtttagttgcacctactccaataatcgctcctgtgatagtatgtgtagtactaacggggattttcaacatttccgtaatgtagagagtgaaagcacctgctgtttcggcaatcactccttccaatggggttactttggtaatttttgttcccattgttttcactattttccagccaccggacatcgtaccgagtgaaattgctgtgaagcacgaaaaagcaacccagtcgggaaggtcattgatgctgttgatacccatgcccaatcccattgaatggccggctatcatggcagcggcaataatacccattactttctgtgaatcgttcaagccatgtccgacgctgaagagggcggaggatacgagttgtaacctcttgaaccattgctcggctgtgtgaggatgtgcgcgtcggcagatgtagaggacaaacagggtgaaaccaaaagcaatgaccattccgataaaaggagccagaaagataaaggctgcaattttaagaatgatgttaagctgaattgcttcaaatccgtttgccataatggcagctcctgcaaaccctccgataagggtgtgtgaggaagaagacggaatccctttccaccaggtaaccaggttccaagtgatagccgctataattcctgctaatataatgggcagggtgatatattgctctaccacagtcttggatactgtattggcgataccgaatccacctattatatatttggcaatgaagaaggctacgaagttgaagaaagcagcccatattacagcttgaaagggagtaagcaccctggtagatacgatggtagctattgagtttgctgcatcgtgaaagccgttgatataatcgaatatcagagccagaatgatgatagttactaataattccatgtgttccggcttgctttatgcgtactttacaatcaggtttttgagaatcttacctacatgctctgcggcatcggtcgttttttccagttcatgcatgatctcctttattttgataagttcaatgcaatctttttcctcttcgaaaagtttggtgataaagaattcgtatacatcatccgcctggttctcgatttcatgcagtttggaacagtattcacggagaagagtcggtttcttacggaatgtttcgagttcgtccatggctttgcatatatagatcgcttcctcctgaatcaaacggctcaactctttgccattctctgaaataggacggggattgtaaatagagattcgtttggcacaactgtttattccgtcaatgacgtcatccatgcaggaagctaagtcatgaatatcttcgcggtcgaaaggagtgataaaggtagtacctaattcatcaaaaatcaggtgtgtcagtctgtcgccttcccgttctaggtctttgatttttttgtagtagtccgaacgttctgtaggtgagtcatgttgcaagctttctattaaaacaactgatgcttcgcagagcacttctgatagctgtttcagtaaagggaaaaatttgggctcctttggagtaaactggctaaaaaaagaatttttcataagtgtaaaaactttaaattgtttttttcttctctatttatattagtaacaaatgaatacagattatagtttgctgtttttaagattttagtttggcacgtactacctctataatggcaggcaatacagagataaatatgatggctacaatcagtaatttcaggttttcctgcacaaacggaaggtcgccgaagaaataaccagcataacagaatacggcaacccagagcgcaccaccaactaaattatacatcataaaatagtagtaattcatctttcccattcctgctacgaaaggtgcaaatgtgcgtactatcgggacaaatctggctagaataattgttttcccaccatactttttatagaactcgtgtgttttctccagataactttgtttgaatatcctggagttggggttattaaacagctttcggccgaagaaatgtcctatcatgtaattgcaggaatcgcctaatacggcagcagcaaataagataatgacaagtatatgcacgctgatgggcatatcgggtaatgctgaaatggctcctgcaacgaagagtaaagaatcaccgggaagaaaaggagtgaccactaatccggtttcacagaagatgatagaaaacaagatggcgtatgtccaggcatgataatcacgcacaatcatcaccatatattgatcgatatgaagtataaaatccaataaaaagtccattttatatactttggttattattgtaatgaaagaatgttataggcttccagaccatagtgaattcttttttcactcaaatggtggaggcaaacagaaagtggggcataaaagacttgaattgtcctatgccgaaaaaagatataaaatggctaaatgagtatgtgtcctaatgaatagatatgatatctatcggaatatttaaaaagattggtataatatgaaaaacctgtccattgatttttaggaagttgaatctttagcgagcttagtatgcggatagtgacagaaggaatattgaatcttagtatttttaagggagagaggtggcggaaggaaaatggatttaaaacgccgttatcgttattgtaattttgctttccggcgtattcttttgtcttgactagtttctgttcttgatccagttgtataatgctagctttagaggtatatgaataggaataggtttgtatgccgttactaccggcttctaaccggtatgcctcttgtgcttcgttgaaaatcagatggaatccccaacacagaaatacgcctaatagtatacaaaatatgtacttcatcataacggccgcaaaggtagaaactatttttatatgaaatacatattcacaagcataattaacaattatatcagtgattaccgggaattattctttgaagttgcttatcgtaaatttcatcggagtatatgttatcccattggtacattgtttcccggcaattttatcgaagcccagactttgataaaaaggaatagcgtatgtggatgaattaaccgtcatttcatttaccgggcaatgcttgattgcaaaattgaataattgtttgccgatgcctttacggtggtgttcttttccgatgaagaacagggatagatgcttcccttcattcttcgttcccataatgcctactagattttcattgtcaaaagccccgtaaatcactaattcattcataagttgctcactaaagataaaacttttgaatgaattcaaaccttcttcatcgaagtcttccgctccacattgtatatatacctccaatgctaatgaggtagcccggtcatattcggtcttgtctaatttgcgtatcatggcgattgcttttatcattaatctgccgggaaatttactattaattcccggatataacattggaatatgatttctttttcttttttttgtaaaagctgtagggtatttccagtctgagcgctcttataaatagaaacgtaatttatttacctttaaaaagcatcagtatgaagaatgtagaaaaacacttggttggatggctgtcagtttgtttgctgctttgtagctttcctgtgtgggcgcaaggagatgccggagattatctaacaatcgttggtatggtgaaagacaagcaaaataaaaaagctctggagaacgtaaatgtatctgtgcatggcagtaatatcggcactgtgacgaatgcggaaggagaatttgctttgaaaatcaaaaaaacagaagcgccgcgcgaactagagatttcacatataggttatgtaaataatcatatctctctggagaaagaaacaccctctaagttgacggtttggctgacacctcatgccaacctgctgaatgaagtggtggtgtttgctgaaaatccacgtatgattgtagagaaggcaatcagtaagattcctctaaattatagtgataagcgtgatatgctgacgggattttatcgggagactgtacagaaagggcgtcggtatatcggtatatcggaggctgtaattgatgtgtccaaaacagcctacactaatagaaatactaattatgacaaagtaagggtggtgaagggacgtcgcctgcttagccagaaagcgagtgatacattagctgtcaaggttgttggcggccctaacttgagcatcactttggatgttgtgaagaacaagggagcattactcgatatggaagaattgaataattatgagttctggatggcggaatccatgcttatagataaccgtatgcagtatgttattaatttccgcccgaaggtaatccttatgtatgctctcttgtatggcaaattatatatcgatcgtgaacgcttgtcatttacccgtatagagatgagtctggacatgcaggataaatcgaaggcaaccactgccattctatataaaaagcctctcggtttaagattcaagccgcaagagctgtcctacctggtcacttataaagatgtggatggaaaaacttatctgaattacattagcaacacaatccgtttcaaatgtgactggaagaagaaactgttttccacaagctatacagtagcttccgaaatggtcgtgaccgacaagagagaaggaatgttggagactattcccaacaaagaagccttcagcttgaatcaaatattctatgataaagtagacgaatattggagtccggacttttggggaaactacaatatcatcgaacctacggaatctttggagcacgcagtggataaattaaaaaagcaatcgaattgaaacagggatagttttcttatatttgaggtcaatcataaagaaaagcaagtatgctggatgaactgctcatactaaaaaagataaagggaggtgacataaaagcgtttgaggaactctttcgccgttactattttcctctttgctgttatgcggcaggcattaccgggcaaatggaagtggctgaagagattgtggaggaacttttttatgtactttggaaagaaagggagcgcttacagatctttcagtccgttaaaagttacttgtatagagcgactcgtaatcaatctttgcagtattgcgaacacgaggaagttcggaacagataccgtgaaactgtattgactacttccaacccagagcagtcaacagatcctcatcaacagatggagtatgaggaattggagagattcataaatggaacccttgaaaagctgccggttcgcagacggaggattttcgagatgcatcgtctggaagggcggaaatatgtcgagatagcgacgcagctttcgctttctgttaagacagtagaggctgaaatgacaaaagcccttcggacattacgagaagaagtagaaatttatattcacatgaagtgatgaaaacagatatttataaaataaagacagatcaggcgtggaatcgattgtataatcgcttggacaatgaccgtttacttgcgaaagtggatgaaggccaccatacacgcaaatattcacaatggatcaggtacggagcagttgccgccgttttgataggcgtcatttggggaactttgtattgggtgaccggttctgataaagaactggcacagcatcttcttacacaggaaaatcaaggtgtttccactttggcaacgactctcgaagacggttctgtcgtactcttggcaaaagaaacttccctgttatatccgaaacattttattgctgataaacgggaagtgagtctacagggaaatgcgttctttgacgtagcaaagaagcagggacaacccttttggattgacacggagcaagctaagattgaagtgctaggtactgcttttagtgtgcaaagtgatgaaaatgctccgttccgtttatccgtacaaagagggatagtgaaggttactctaaaaaaaggaaatcaggagtgttatgtaaaagcgggggaaatggtagtagtgcgatcacaacgattagtcgttttggatacagataaggagaatgaagagttggggagcttctttaagcatatacgatttaaagatgaatcgttagcgaacattctgaaagtcatgaatttgaattcggatagtttgcaaatacaagttgtctcaccggcattggaggaacgtcggctgactgtcgaattctctgacgaatcttctgaagttatagctaatctgatagctaatgcgctcggtctgcaatgtatccggcaaggagatattcttttattatcggaatagaactcattaaagttgggaaaaatgaaacagtcttatcattatctgtccgttctgctgatactcttcttcttcgtcgatatgatgagagcggatggaagtgatgtgctggaacgtatagtcagacttcccaagataaaaggtactgtttattcattgttgagtgatgtctctcaacagtcgggatatatgtttatttatgatagtaaagtcattgataatgatgcagtagtgaagataaagggaggcgaacgttccattcgtcaggcagtgtatgacatcgtaggaaataccagtctggagtttcaagtgatgggcactcacatcctgattactctcccttcggagaaaaaggtacgtgtgcaacaagattttgttccggaacagataacaaactttgtcattatcggtactttgctggataaggagacaggaatacctatctcttctgctactgttggagtgcgaggaacatctattggcagtataacgaatcagaatggagattttaaactgtctttacccgattctttgaaaaatgattcgattactttttctcatataggttatctttcacaggacatagagtttgctttgctgattggacggcacaatatacttagtctcgaacctaaaattgtccctttgcaggaagtggtgattcgtcgaagtgatccaaagaaacttttgcgtgaaatgattgagcggcggaataagaattattcgcatactccggtatatctgactactttttatcgtgaaggagttcagttgaaaaacaaatttcaaaacttgtcggaagctgtgtttaaggtttataagacatccttatattcttctgtaccggatcaggtgaagctgttgaagatgagtcggctaagtaatgtagaagcaaaagacagcttgcttgtaaaagtaaaatccggaattcaggcttgtatccagatggatatcatcaaagatatgcccgagttcctgactcctagtgtagagaagggtatttatgactatacttcagaaggagtaacatttttagaggaccgatttgtaaatgtggtgcattttgagcagaaaaagggaatcagcgaacctcttttttgtggagagctatttcttgattccgagacaagtgctctattgcaagcccgtctggaagttcatcctgtatatgtgaagaatgcggcaggtatgtttgtcgaaaggcgtacgcgtaacgtgcgaatgattcctcaaaaggtggtatatacaatttcttataaaccgtggcaagggacttattacatacaccatatccgtggagatcttcatttcaaagtgaaacgggtaaaaatgctgttcggcagccgggatcttcatatctggtttgagatgattacttgcaaggtggataccgagcaagtggtcgtatttccccgtacagacagattgcccacccgtaccatcttctctgacacctatttcaaatatgatgagaacttctggagggacttcaacgtgatcccattggaagaggaaatcagtaaactgatagaaaagatctctttgaagatagaagaaataggtgattgatttgttttgtcattcaatgagattgctgtacctttgcatccggtttaaaagattgtatgttatggaattaccaaaagatccgatgatgttgttcagcgtcatcaatatgaagttacgtgattgttattcttcacttgacgaactttgtgaagatatgaatgtggacaaggatgaattagtgaatcagttgaaagccgtgggctttgaatatagtgtggaacacaataagttctggtaatcattttcttgtttacaacttatagataaactactaaaagtgccttcatcgcctttacaaaggatatggaggcactttttatatcttatgcgcagcttctctcttactctttcttgttaataaaagcaaaatgcggattcccgtatttaacttccccgctcttcttcgttctaactaataaagctcagaaaaagaattgatgataaacgagaataaaattcgtgaagcttgtgcctcgaatcgcgaacggggattcaagatgttgatggactcttttcaggtaccgatatataattatatccgtagactggtcgtatctcatgaagatgcggaggatgtgcttcaggaagtctttatccgggtgttccggcatatcgatcagtttcgcgaagaaagttcactgtcaacctggatttaccggattgccacgaatgagagtttacgcttgctgaacggtcgtaaagatgagggagttgtttctgcagaagatgttcaggaagagttgatgggcaagttgaaggcttccgattatattgattatgaaaatgagctggcagtgaagtttcaggaggccattctaagtttgcctgaaaagcaacggcttgtattcaacttacgttattacgatgaacttgaatatgaagagattgcccgtgtactggatagcaaagtggatacactaaaagtgaattaccactatgcgaaagagaagattaaggaatatatattaaacagatagaatgatgaaaaaggattttgattttgacgatattggtaaacggacaccttaccgtacccccgatggattcttcgaggatgtgcaacgaaaggtgatggaacgcgccggagtgaagcaacagcggaaatctcacatgaagctgattatttctacggtgattaccatggcggcagtattgatcggatttttgtttgttccatctttgagacaggcagatgaggtgaaaacgtcttcttcgaaagtattagctaatggtacagaatctgtagataaatggattaaagaactatcggatgaggagttggaagagctcgtcagcttctctgaaaatgatatatttttgaattaagtaactcaatcaattattttaaacgtgaagattatgaagactaaatttatttatgtaattatggccgtcctcctgatgggaagccagatgactttgtctgcacagaatacggataacaaacaaaaaaaacagcgtcctacaccagaacaaatggtgcagatgcagactaaacaaatagtaaaaacattgatgttggatgatgcaacggcagctaagtttactccggtatacgagaagtatctgaaagaattgcgtgaatgtcgtatgatgactcataaggcgagaacagagaaaactaaaggacaaggcacagacgctaagaaagaacgtccgtccatgactgatgacgagattgcgaccatgttacggaaccagtttactcaaagccgtaaaatgctggatgttcgtgaaaagtattacaatgaattcagcaagatactttcgcagaagcagattttgaagatttatcagcaggagaagatgaatgctaataagtttaagaaagagtttgaccgaagaaaaggacagaaaccgggacagggacatcaccaggggcaaagatctcgcgctccacgtccggaccagaaataaatattaggtttattttattatagttttattttactaaatcaacacaatttgaacatagacagccatatttattcttttcagtaccgtttgattacttgttatgtcttgttactgattagtttgactgtttttgctcagtccggcaaagagcgtttttccggtcgtgtgattgatactgaaacctatcagccggtaccgtttgctacggtccggcttttagctttaccggatagtacattgttgggcggcggcgctacggatgctatcggtaaatttcaactttccgtttccattcctaatcatgcaattaaagcgaagtctttattattacaggtgtcatatgtcggatataagcaggtttttcatcccatttccatttccagcaaaagctcttcttacgaattgggggatataaatctgactcaggaaagttatgctttggatgaagcagtggtagtagggcaggctccaatggcggtgacagagggggatacaacggtattcaacgcttctgcctatcgtactcccgaaggctcaatgcttgaagaattggtaaaacagcttccgggaggtgaaatagatgcagacggtaagttgctaatacatggcaaggaagtaaaaaagattttggtggacggtaaagagtttttctctgatgatccgaaagctgctcttaaaaatcttcctgtggagatggtggagaagttaaaagcgtatgaacgtcaatcggatttggcacgtcttacgggaatagatgacggagaggaagagatgattctggacttgtctgtgaaaaaaaatatgaaacggggctggatggagaattttatgggaggatatggaagtaaagaccgttatgaattagccaataccttgaaccgttttcgtgaaaactctcaattaaccattatcgggaatctgaataataccaataaccagggattctcggaattacagaatgaatcttccagttcaacaggcaatatccgtagccggatgggactgactacctcccgctcattggggcttaatgcgacttatgattggaagcgcgttaaattacgttcaaatattcaatatgtcggcaccgatcgtttggaagatagccgtaccacagtcgacaactttctccgggaagataaatcaatcaatctgggcacgagtcatagccgacaacagaatcacgaactggtagccaatgcttctcttgaatggaaaatggattctgttactacattgattttccgtcctcaatatcgtttctcagccaatgatagagagaatagtggctttcaggaagggtgggggaatgatgtcttgttgaatgaaagagagtcctccggcaccaatcataattcccggtataatctgacgatgatgttgcaacttagccggaaattgagtcgtttggggagaaatgttgctttgaaggtagactatggtactaatgcttcagctacagaccgaaagagcctttccaccacccggtacttcaaaaataatacgaagaagattcagaatcagaaaatagaggatgatgttgacggctataattaccgggtgcaactggtgtatgtagaaccattgccgtggcggcatttcctgcaacttcgttacagctatcagtatagagtgaacaattcggatcgttttgtctatgactgggataagaaactggaagagtttgctcctgactttgatgaagactctagtaaccgttttgaaaatcaatacagtaatcacttagtgaaccttgccatacgtacttcacaaaagaagtataattataatattggtgttgattttgaacctcaaaagtctgttagccattcattgttgagtgatgctcccgaagatcagttggaaagatcggtcatgaatttttcgcctactgtcaatttccgctataagttttcaaaacgcacccgtttgcaaattgtgtataggggaaaagggaaacagcctaatatacgtgatctccaacctgtgaccgaccgtaccaaccctttgaatatccgtgtcggaaacccttcgttgaagccttcatatatgaatacttttacgctgaatttcaattcttataataccaaatatcagcgaaatatggtagctaccgctttgttcgagaataccattaacaatgtaactaatcaggtgacttatgatagtgaaaccggtgtacgaactacatctccggtcaatatgaatggtaattggcgggccatgggttctttttctctcaataccccttttaagaatcgtaactggatatttcgtacttactcctatctgcaatatcggaatcagaatggctatacaaccttgaataaagaagaaccggtgaaaacttccgtacagcatttaacgggacgtgaacgtctacggattacttatcgtacccgccaaatggaacttacagggcttgttggcctgacttataacaattcttataatgacgtacgggagaaacgtactgaaacttttgattatcaggcaggaactgaattgcagctttatcttccctgggggatggagttatataatgacctgacttatttccttcgtaccggatatggttatgagggttatgccaaagcaaatttcatgtggaactgtcagctgtcaaaagcctttttgaagaggaaacagttactaatccgcttcaaaatatatgatattcttcatcaggacatttctatgatacgcacgataaccgctactgccattcgtgacactaattataatgcactgggttcttactttatggtgcatgctatctttcgtttgaatatgatgggaaaataattagaaattaaatcttcattagtttgaaaaccacagcagggttttgattgttgtatgtcctacgtataaaaacaatgtaaggctggctgaatgtttcgactgataaaaatgataaaagataaaggtcgttggcgcatttttaaactgaagttgattgatgcccgactgtactttgtcagtatcttcgtaggattactgacaggacttgtggctgtgccttatcattacctattacagtttttctttaatctccgtcacgatttctttgattctcgtcccaaatggtattggtacatacctctttttcttttgatgtggggaatacttgtattcgtatcctggttggtaaagaaaatgccgcttattaccggtgggggtattccgcaaacacgtggagttatcaatggcagggttgattataaacatccttttctggaattggtggcaaagtttgtaggtggaatacttgcattaagtactggattgtctttggggcgtgaaggtccctccgtgcaaataggttcgtatgttggatatttggtatccaaatgggggagggtgcttagtggtgaacggaaacaactattgtctgccggcgccggtgccgggttagctgctgcttttgctgccccattggcttcatcattgttggtgatcgaatctatcgagcggttcgatgcacctaaaacagctattaccactcttttggcaggagtagtggcaggtggagttgccagttggattttcccgatcaatccttattttcatattgatgctattgtaccggggatgactttctgggggcaagtgaaattgtttcttttgctggcagcagtggtttctgtctttggaaagttcttttctgtcaccactcttcaggtgaaacgtatttaccctgctattaagcatccggaatacgtgaagatgctgtatttgctttttatcgcttttctgatttctatggccgagtttaatctgaccggaggaggggaacagttcttgttatcgcaagctatgcatccggacacacatattctctggattgtcggcatgatgttgttgcattttgtttttagcactttttctttttcttcgggtttaccgggaggaagttttatcccgacgctggtgacgggaggacttcttggacaaatagtgggattaattatggttcaacagggtgttattgcttatgagaatattagttatatcatgttgatttgtatgtctgcattccttgttgcagtaatccgtacccctttgacagctattgtactaataaccgagattacggggcatttggaagtcttttatccttctattgttgtaggaggattaacttattattttacggaaatgcttcaaatcaaaccgttcaatgttattttgtatgacgatatgattcattcgcctgcatttaaggaagaaccgcgttacacattgtctgtagaaataatgagcggctcttatttagacgggaaaatagtagatgaacttcgtttaccggagcgttgtgtgataattaatgttcatcgtgaccggaagaatttgcctcctaaagggcagacattaatgcccggcgatcaggtgcaaatagagatggattcgcaggatatagagaaactgtatgaacctttagtcagtatggcgaatatttattaagtgtctggctcttatcctttgatatatacaaaaatagctgaaagagagattcttccagctattcttgtttcagtatattaagtacttattttttcttataccaatcggcgtttgtaccatatttagcccagtctataaatttaggatagatttcgctgatagacttcttctcgtttttatcgaagttctttagttctgcaatatcattagcattggcatttgacaaatagaatgcaaaaggataaatattctcttgattcgatacatagtaaatgccttcattaggtttagaacagtcttcatattgtccgaagagagaagtatcgactttagaagttggtttcttcataggacaatgaacttccaggcgattaccttctttgctaggacggtatatgaatgcatcgattgatgtttcctgctttttattcgagtttttatctccgtatttgaatgttactttatattcggcatttgggtttgttttaacattatctgtcaatatgattgcattgctttcacgagtaaatttgtcagctcccgaagctacagtaaagtccttttcattttcttttctaataaagtattcagttgactgtgcatttccctcatttgaaagaatgaaacctaatccgttagtgaatacagtcgatttattatataaagttttaaatataaatgactcgcttaagatttcattgaatatattgaatactttttgataagtatactgaaccaatacgtcattcatatcgtaatcaccagctttaggccattcatcttcaaatgcgtatacacctgtcttttcaatagttgtatttaagtcttcatctacaggaggaacattagtgatttcaggattggcttttaatgagaatacaacatctgtaaaattctgatcatccatgaaatcttcaaaggcgatagcaatgttactgtttttatctttaaacatagctgtacgtacatctataccgctattaactttagtactaaatccttttgtggaactggcataaaatccttcggttagagtataactgttgaaacctgtaaaataggtgttccatgcgttgcaagcgagaataaaaccaatgtagtatcctttggggaagttcttgccttttggatattccggatcatcaaaatattttagttgtacagctgtaccttcttttataccttggggagaggcttgaaggcttccattattccaggtcatttgagtattggggaatacagcatatacttttacgtctttcagactggcaggagcttgatcgtatctgtaatagtagtagcctaatgaactgttccaacaggtccatcctcttaatgcagttagtactacggctgtttcatcttcctctacatataagtcggcttgagtacgatattcctctggacaacttcctaatgtattcaacaccttgcttacagtagtacgtaattcgttcatttcagatttacttaaagtgagcttaggatcattacctttataagcataatcaataactccactgcgatcgtcgaatgaaccgagattagtattccaacctagattattaaaccgatttctatcaaaccgggttgactctctgtaggatgctctggtagtaaattgttcatctgtgtctgatactttcaaaacaccgttaactatttttccagggattgcctgtctggcaaaaggtgatgtagaaacgatatacacattagatacataagccggcaattcaaccgttgcggtgaatttaccttgttcatctgtccatgcaccatctaatgcctgaacgttttcttttagaatgatggtgttttcaccttcaatcaatggatttccatcataaatggaaaaaggaactcttgattcggaattggaacaatcaatttctacttgtactttttgtatagtagaaaaattagaggtgttaatttctacccctggagcttcttggtataagtctttatcactatccacacaactgcttatacccactacaattaccattgtgcatgctaaccaaaatcttctcatatctaatagtttttgtttatgcgatactttagttcgttttgtttttaaaagaaacccgtaagttctttgaagttcaaaggcttacgggtacaaagatatatataatattcaacacaaccataaaatagttgaatattttttcaaaatatattctataacttgtattttctaatcttttattccatacttcttagccatgcaatttcttctttccatttactttcatccggagtttcgagtattaacggtatattatcaaatctggaatcttgcatcaatctttcaaaaaaagctttgccaatcaatccttcaccaatgctgtcgtggcggtctacatgggtgcctagtgctttttttgaatcattcaagtgcataccacgaagataattgaatcccacttccttgtcaaattcatcaaatactttatcgtattcattgacaatatcgtaacctgcggtataagtatggcaggtatcgagacaaacacctacccggttcttgtcgtttacccgatcaatgatatatttcaactgccagaattcgcttcctaaattactgccttgtccggcagtgttttcaataacggctgttacaccttttgttttctctaaagcgagattaatgctttctgcgataagtgacagacaatcttctgttgatactttattgagagagctaccggggtggaaatttaaaagtttcaatccaagctgttcgcaacgttgcatttcatccagaaaagcggcacggcttttttgaagtccctcttcctccggatgtcccagattgataagataactgtcatgtggcaggatatattccggttggaaaccatatttctcacaattctctttgaagagactgatactttcttctgttagcggtttacttacccattgacgttgattcttggtgaataacgcaaaagcatttgctcctatttcatgcgcattaatgggtgcgaactctacgccaccagaggcgctaacgtgtgctccgatatatttcattgttctttcttaatttattttactctgcaaatataacgtttttaaaggagtatatgtttgtagagagaactcttcttggttgcaattcataggatcatgtactttatactctgttctttatcttttattctctataaaaaatatcccgctattcaatttatagaagattgaataacgggacagtttttgggggggagagattaaatctcaaaatccggtaaatagtctgtcaggactttattaacctgtttcccttttacctgatctgttaccgtcgttgcaccttcctttttaccggcatcgtagtttaagtaaactttctccactttattactaacgtggatagcagcttttcctttttccgtaaggttgcaagtgatagtccagtcacctacttgaatgatattgcctttgcgaactacctgcatatccggacggttgtctccatgtgtatccatcacagtcaggaaacgggcggttttgcaaggaacagttgtagaagagaaatgccagtgattaggatatttcactgcttttccttgtgcattcgtcacatttttccagttggtcggagcacagaagaaagtatctaccattgcctgttccgtttttgccgaactgaaaagatgggcaacagagataccgccagctttattccttccggttactttcacctcatcggtcagttcctgtatttccatcggtaattctacagtatgtaaaaggtaaccccatgtaacagcctcctttccttccagttcatcataaatcacgaaaactccggtacttcccagttggatgatatgacggcggaacatattcagtttgttctcatcccatcctttttcaggcgtatattgcgtaccggatagttctccacgtttcagccataggggagaagtcactttaccataagcattggaagcatctcctaccatataagcgattttttctccttcataccaacgcggaatccagccatatccttccgttccaatcttttgagtcattccatttaccaaaatgctgttgtgtgcacgggtgttacggtaagaatacatacaatgatcgtccgtaaaacctgtacgatgtccgctgctgtaaaaaatggctttacctccatagaatgtattaaaagcattctgattggccagtgcatgggaagtggaaccataagaactggagcggaacgataacatggcattcttatctatatctcccaaagaggtattcatcgtaccgattcccgtttcattgaatactttcgccatgggtagttcggcaagagtatgtccttctttggggagagcttttttggttgtacaacgataccaggtcaagtctccagattttccgaggaaagttttttccatgatatccggttccttttgcagaatggtacgtacataagcagccgcccacggattattacattcacgtgccaaggcatccgcataacctactcgtgtaccgttcggcttcattttgctttcatgtgaattgccttgtccggctgattttgagaatggaggctgctggtagatgacgtaaaatgcattgttgttataccacggatcagcgaagaaatcgaatccgctgatacgggagtagaaagcgggaacttcaatcaatgtgcggagattgacctggaaataagaatcaccattgtgccatcctccatccgcgttgaggcccggcagacgggatacccattcattgtagcaataatccacccaggtggaagccatcgggagttcgccatacgtagcaaatgcggccatattcaagatacggaaagtcatttgccagacatgattatcagcaatgcggttttccaagtgattgacatattcatgatagaacttctttccattgtcacgaatcgttcttaggagtagttctctctcattcggagtcaacagattgtaccatgcatcatacgctgaagtgctcatggacagaatagtagaacgattgaaatctccagcaaagtacttactttttttccaggaaagaatttcggaaagacgcttaatgccttctttgtagtatacctcatctttcgttagcaggtaagcgcgtaccatggcttcgatatttgcttcttcacggtctacaatcttacgactttcccgaatcagggcagaacgatattgaacaatatttgtcaacttgacaacctgggttgtatcaatttcttcttccagatgtttcagcgggtggttcaggcatttatcggcttttcggatataagcctgtgcctccggattgtttttattccgttcgatgatattatcccaatcttcggcatcaagcaagatgcggggatgagtcttgggcaatttggttaatacttcctgtagagaaggagggttgaatgtacgtatgtgttcgtctatataaaaatgataaacaggtgaccattcttcttttccttctttgttaacgtaggcatgttgccaataccatttccctttttcaaagagtttgaatgggttgaaaaatgcccattttctttcggcggtaatcacttccgatttaaattcggggtcgcgtgcaatacggatgcggtaggttacttcgggtttgtagtcctcttcttcaactccgtccaatacagcaccgaggtgcgggaacttatccggccacataaaacgtgggggattgacagtaatatgctgtccgtccagaggcgaaggcgtttcgcggacttcatgcatcaaggtctgttgagtcagacgcatgattcctttttgtgcatatccattggcgaatagcagaagggtgaacaagagaaaaatagatattcgttgtttcatcatataactttgcttttattattcatcgctttgttattcagcgttgtttgaacaaatctttcagacgaacagtcttgttattaatcagtggacatgcccagaaaccgataaaggtgatatatcctacaaaaacaaggataaagagcatacccgtacggagtgatgttgcatctgccagtgtacttacaatcatcggaccaccggcaccacctacaattgccgagcatagtatacctgcgaatgaaccgtggtgctgtgacgcagagttcagcgccaatgagaatacgatggaatacatcatggagatgctgaatccaacagcagggaaagcaagcatggatacttccttacttccgaataatgccgataataataggatgatcgtcagaattccggaaatttgcaacaatcgtttactgtcaattaacttgagcagaatcatacctaccagacaaccggctgtcatcaatccccagaaatagcttacggcctgtgcaccgtctgtttgtgggttaactccatgatattgttccaagaaggtactcatgaagattgaagttccctgttccgtacttacatagcagaaaattcccaggaaaaacagccatacatatttctgtttgaataaagccagatatgaatctttagacccgcttttctcgtcttctttcaactcgatcttgggaaaacgggatacaccgacagctatcagcatgaccaatagcaggattgtaaatacccaataaagagatacccacggcatttcccgtggagtgacatcggccaacaggtcgataaagaaactcttacctgctgtatatgttgccggatcaagttcacgaatcagataagtatataccagaggacttaggaaagaagcaatgccaaacatgaactgtgccagttcggcgataaatgcatagttttcttctcctcctacggtacgttggagtggattcaataccgtttgtaacatggccattcccagtccgatgatgaaagaagaagccaataacatcggatacgtgtgcatgcaggcaaataggatggtgccgataaacggcatcagaaatccaccgaataatatcggcttttcaccgaaacggtcgatgagcaatccggcagggatagacatgatggcataggccaggaagaaagaagtcgggataaatcccgccattgccaggtcacttagattgaagttgtggataatatccggaatgagtgggcctagaatattggtgataaacgagatggtaaaccagaacgccataatcagcgccagcatccctaaattttttctcataatcttaaatagttgatagttgataaatgataactgatagatggaagttgataattaattgatgattgagtatttgtatgttgggataactttcatttactaactatcatttatcagctatcaactatcatttatttttgttttcatttgaaaaagagtgaagcggctccaatacttccggccttgtttccaagagcggcagctatgatttgagtattcacggcacagtcggggatggcgtaactgcgggctttttcgcttactttctgaatataaaagtctccggcttcggaaagtcctccaccgatcacaatcttttgagggctgaagatattaatgaatcctgcaattccatgtcccagaaaatcacagtgttcttccagcgatagttgtgcaatcttatctccttgtttgtaaaggcggacgatcagttctccattaatctcctcattcgggtaggagatacctgcgtctattatccgttgactgaaacggtgtaccaaggcggaagtggaagcataatgttccagacagccgacggaaccacaggcacaaggttcgccattggcaatgagaggcacgtgccccagttctgtcccccggttggcataaccgttgaacaatttgccatcgatgactactgcaccgccaatgcctgttcctactgttaggaaaacaacatgagtggctccctgtccggctccatacattgtttctcctaatcccatcagattggcatcatttcctaataaagccgggaatccggtttccttttcaatgcggtccgccagatgtatgttttcccaaccgttgatgttttccgcacctcccagaactatgcggtttgtagaatctacgatgcccggtgtaccgattcctataccattgattttgtagccttgttcctgtgcaaaggctttcacttcattgatagcagtaaccaactgtccgatgacagcttctgctgatacatcggctttcgacggtaacttcccttgaaagtaaaatacgccttcattatcaattagggcgtattttacagaagttccgccaaggtcaattcctatagcgtattctttttccatatcaccaagtaatacttaatacttaaaaaaatcacactctttctgcccaaatcggtgaactccaagcccattgtccgtcacgttggcgaacgcgtacatagtagtagtccgtatcacgttgcggctctttatcttccatgtagtgttccaaagtgaaacagctttccggcatagcacgattgaaaaggatcgcctcgctcaaccaaccgatcatgaagtgtgaacgtgaacctttgagcaactcgcccaacgtatgttcaaacttcttgccattgaattcggcaatgatcttaccgtctttgggcatttccacatccagaatgacggcttgcatggctgctgtagtcgtattcggatttttgctgctatacatatccagttcggtttccttgttgccaacggatacgatacggttgacatgcgtgtggaattcagtttcaccttcttgcggagaagtgaacgctgcgccacggaaacaaggagttacactatggatctgtcctttgtccacggacagtttaccctgccaatgtacgtatttctcttcacgattccaaccaaaatcaactttaactttgcaacgtaccgtatcaccttccggggcaatcggagtcagcgggccattcatgcgagctaaaatctgtccgttcttgacaatatctacatagtcgatacagctttcacctgtaacgttcagatagatacggcggctgttaccgcgaaccacgtcacccatgaaagcgtcgttgaggcggaagtcgataataattttatcaccggttgcggcacatacatggcgggtgcggagagcttcccaaatagcgtcgcgagtcaatgacggagccatgacaccgatacgaccgtcgccatagcttcccggataaccggaatgttgatcggtagaagccatgataccgaatttgttgcctaattcaagaccatattgaatggttccttcccattggcgcggacccatatcgtgtagataaggataatctccctgatcgctttctgccagaccatgacgggaatacatttctacgaatggggtaatatctccttcggtaaagcatttccagttgtaaccgcgatagccgccctggtaacccatgtgatgtggagtaataaatactttgtgtccttttgccttctgtttccagtcttcgatagaagtacattccacaagcggtgcgtcgagatcataattcaatgcaacatggtcaccatgttccatgctgtgggcctcgtatccgacaaaagtaaggaattcaccttctttattatattcattcgtcatttttacgtacttctcataaccgccttcacgcaaacgtttgaaagctcctgtgtgataatcaatcacccatttcaggcggggatcatctgctccgggaatatccggccacatagcatgaggagtgacactgacaaaatccaattgtcctttcgctgcttcaaaagcgtcgcgcatgtcgccgtgtccgtatgtgatgttgcaatggttatgtaagtcgccccagtacattttgaggttactggctgacggcataatcttttttgcttctttgcttccagctgcgcaagaacccagcaaactgcctgaagctgccaatccgaggaaagaccagcctgtgttttttaaaaactttcttctatccatggttttatctaatttattcggtaaactaataatgaagcatattaattcttatttatatgtcctcctcttagcggttttgcatttgtcggcgatcacctttaaagaggactttttccttttcatccgggtcagtatctttgtactgtttttgagtgtcctgaagtagctccatcagctctttttgtactttagcatactccggtttgccgaagacgttgttcatctctctcggatcagctttcatgtcatacatttcccattcgtcaatatcgttgtagaaatgaatcagtttgaaatcttgtgtacggataccatagtgacgttttacagagtgttctgcagggtactcgtaataatggtaataagcagctttacgccagtcggccggggttttgccttcgttgaccaatatcggtttcaaagaagctccttgaatatctgacgggatatctactccggcaaagtcgaggaaggtaggagcaaagtctacattcatgctgattgcattactggtacttcctgctttgattgctttcgggtaacggatgataagaggcatgcgctgacattcttcatacatgaagcgtttgtcaaaccagccatgttctccaaggaagaaaccctggtcggaggtgtagacaatgattgtattgtccagttcaccaatcttttcgagataattcagtagtcggccgatattttcgtctactgccagaaccgtagccagataatcgcgcatatattgttgatatttccagctgattaaagatttgcctttcaagtcacctttgcggtattcggcaatgcgcccggcgtatacagaatcccatttatcctgaacttcaataggcatacgtttatatacactataaagacggttggttgtatctttcagcatctcttcacgagtcatcaatttgagatcccagtcgtttgtcaacgtgtgctcgatagacatatcctgctcgcgagcagctcttccacgaccttcgtagtcgtcgaacagattagccggttccgggaaagttgtattattgaatatgcctaaatgacggggagcgggcatccagttacggtgtggggctttctggtgatacatcatgcagaacggtttgttcttgtcccgtccttcaaggaatttaattgctttgtcggtaataatatccgtagcatatcctttttctacgatatgttttccgtcttcccagaaatcaggatcgtaatagtcaccttgctcatgttggccgctaaggatactccaatggtcgaaaccttgcggttcgctgatgaggtgccatttgccgatcatggcagtctggtatccggcttgctgaagaagtttggggaatgtctgttgatcgccgttgaatgtacttgcattatcggtaaaaccattctcgtgactgaacttgccggtgaggatgcaagcacgtgaaggtcccgaaagagcattgacagcgtaacaattatcaaagcgaataccttcattggcaatccgatccatattaggagtttggatcagattgcctccataacaggacattgcttgagtggtgtgatcatccgtcatcatgaagatgatgttcggctgtctgacttcttctttcttttggctgttgcaagaaacgaggcttagtgctgccaatgggaagagtagggtagaggaggtgtaatagttttccataatgataagaagcctctcccaagaaaaggggcagggagaggctttgaggctttttatagtttgtattttaatgactgtttctttccgtttactttcacttctacttccagaccgttttcatcgaacgctttgttcttgaatttagcgtcaaatttaggggcatctgcgcttttcttaaccgggtagataacagtgatgtaacgtacagcttcttcgccgtcttttctcacgttgaacgatacattcatacgtttgtagcgtttgcgataagcagttgaacaccatcctggttctttcttcatactcatgccagcagggccgaagcattgcagtttcatgttgcttccatcctcaaactgtgtcaggaacgtcatgtcttcgcggctgttggcaatttctcctttcggcatctgatagtggagattgatagaacctttaccgctacctgccatttcatctacaatgacaaagtaagtgttatcaacgaagaaaacagaacgacggtgtttcagattcttgtaactcggattttcagtcactaaagtctggatagcaccttccggttgccacaacttagtaacagattctgttgtatcgagattcttgttgtccagggttactgtgttgtgaacacaagtctgacggtgccagttgcgttgttccattacttcgccttcaccggcgtatacatacgaaccagaatccgggaacaaattcttgccgttgaaccaaagttcaaatgtaccattatccggctgacagtgccagaaagctttcggacctgcctttactaccatttgggtagcatccattccccatgaattacggaatacaaagaagcctgatttcaggaaacctttagacatataatccggcaatgcaccttcttttccttctgtagcaaagtatttgattgcctggttcttcgggaacagtttactccatgacttgtagtttttcaccatttctttctttgttgtcaacttggcgtcgctgaaacatggattggtgtaatcagggaaagaaatgtttgcatagaacataatcatgttttcaatggtatccaaataatcttgagggaattccttacggaatccgttagtatctgcgatacctaaggctttacagaaaatgttaatagctgccagatgataatgtgggtcaagttcgaactgtccgccatcttcgtatacctgtacgtgaatttcacggttcagaatgtcgataccactttttctccaagccggagcatctttgaattcagggaaaaaggcacctgcataaatcatgcgttgagcttcaaacagtaagtggttgccttgatccgagtaattagcaaggatatgtacagcatgtttgtaatagttcactaggaattctgtcaggaagtccggagtgaaagaaggggagggaaggaataactggaactgtgaagtctggtcttgcagacgattactcacttccagaggacgccatgcaaaacgtacgttttctacttcacctttgatttttccatcacttaccagctcatattctttcttgtccatcttcaccaatggattctttttaatccagtcgatatactggtgtgcccattctttagcatatttttcatcaccggatatacggtaagctttacccattggagtgaaccatttgtgacggtgcaactgccagcggagctcattatctttcaccggccagtattgccagttgatatcttctccataattgtaagaaggttgataacctttatgtacgaagaatgtatgtttcaatccgtcatccgcccattgctgttcttctttgctgatagtcaccttgttcagattgatatccggagtttttacgttggtacgtgcacggtaatagtccagcaatgctttggcagcatcctcatctttaccctcctgatgcaaagcttttactttctccagtcccggatagtctaggttaagaagagaaaagacttcgcttttcagttcttgggcataacccttgcttacgaaacatgcgattgcaagcagaacgatgtactttaaagttttattcatgatataataggtgttataattttatgtattagatatctttgtagttgatacctttcagatccatgaatctcttcaatgcttccagataatagtagtcagcatagttcagtggagtgtcgatttcagaaccattgggcagtgaacctacggaatgcatcaaaatgaatccttgattgtcacccacttttgcaagatatgcatcacttgacagactcttcagaattttttccgcataatccagatatttctgtccatcgggaaccattgtgcttagttcgatcattgcagaagcagtgacagaagcagcagatacatcgcgtggagtttctttggttacaggagcatcataatcccaataaggaatagcgtcgtctgtttttacgcgatccataatcatatcagctatatcctttgcaaagttcaggaagatactatcatttgtttcgcggaaacaagcggtatatccgtacacagcccatgcctgtccgcgtgcccatgaagaatcatcgttcttgccttggtgggtttgttttcgttctactgtaccatcgctgttatagcttactacatgccagcaagtataatccgggcggaagtgattatgcatcgttgtcatggcatgtttgatagcgatgtctttatatctattgtcgcctgttgcttttgctacattgaacagaagatcaaggttcatcatattgtcgatgataaccgggaagttccatgttccgaaatcccatgaacggatagcaccgatagaatcattgaaacgaccgcaaaggttatcggcagtttctctcatcacagcagcgatggtatcgttaggtgaaagacgttctgcattgccgtagctacagttgaccataaatcccaaatcatgtgtacctttataatagcgtaccggattcagaagattggtatattcgattgcttgagttttcagtgtatcgtttcctgtcagttcgtatgcataccataatgaaccggggaagaaaccgctcgtccagtcataaacgttgcagaggcgacgtttgcctaattgctcggcagtaggttgtgcacgtagggaatctttaaatgttaatgaatctctttccaactgacggcaaaggaaatccatgtcatagccggtacggatggagcgtggcaacatccctgtaccactaacctcttcagcagaaagttgtaattgggcagaagctacatccagtcctttttttatccaactgtagtcttcctttggggttgtctggcacgacgcgagtgcaatactaaccgaagcaaagagaacaagtttctttttcatgttattcattttaagtgattgtttttagaagttttgtaactgatgcaaaagtaggcgaaagacctaattttgtgttacaggattgtcgaaaaggcgtttaaatagagcttttcaagttttgattttgttgaaaaaggttttaaatatctccaatatgccctatttaaggcatattggagagaagttatagagattttgttaccaaccagggttttgtttgaactgaatacacaagtccttttcacgttgtggaataggcagtaattcatgtttgtttttctctgtatatttatataacaaatatctgtaattatctgcagaatcccaccagtttgctaaagcagcattcgttttttgtatagtttcataatagatgccccagcgaactaaatccatacgacgatgaccttcaaatgctaattcatacgcacgttcttttctgactgcttcacggaaagtttcttcatttaagtttgaaaggtcgcagcttcctgtattgctaggatatccatatccacgacgacgaacttcgttaattgcagcataagcttctgtggtaggaccatgtttccattcattcagcgcttcggcatagatgagtaatacatctgcataacgtaagaaataccagtttgcgttagatttatcgttattgataaccccacctgtcttttggtattttataagatcccatttggctggtgtatagttttgtttttctttttgagcttgagtgggatcttggtcttttaattttgcagattcttccgtgtcacttttacctttagcccataatacgtaatcgtcatcatacttatagtttgctactgatagatcgcgacgtttgtcatttgcatttttgccgtctctccaatcgagcacgaatgtatggactactttcatatttcctgcacaactacctcgtacaccggcgatagctgttgtttttactccattccatttgccgatacgccctacaggatctccagaaccagatacggtaggagaatagaatgaaatctcgattaagctttctgttggatcccatacactgctacaagtattttcccataacttttcataattgcgcagtaatgaatgtttgccggattcgatgaggatacgtgctgttttggcagcatcttcccattttgctgtattttgtacaggatatcctgcccatgtagcatacacttttgccaagagcccaagtgctgcccctttactaaaacgatatgatgtgttctcacgaagctgatcgtcgattgcatatggtaggacttcactagcataaagaagatcgtcttcaataaattcatatactttatcaggagtagcctgtgtaaaagtagtaggagcttgataagacatctctgtactggtaatcaaaggaatatttccataacgacgaactaactcgaaatagaacatggctcttaacgctctggcttcggctatataaagagttgcgatttttttatcagtagtattataagtctctatttttccactaatacgttccaggaagtcgtttgctctgtagatacctttataaagaacttgccatgtttgttgaatttctacttgggtagtaggaaaagtgttattgacaatgatacgataattcgttatatcggaaccttctccttgagatatatctgttcccatgttgaacaagaaagatagatgatacccgtatgcagcatcttcaacagttgtacgatatactcctaatagaacatcttgtgcttctttagcattagtcatgtaattcttcttttccatttcgcttcttgcctcttcatctaatgagcatgaataaggtaaaatgcacagaatggacattgctatgtaatatattaatttcttcatattattttctcatattagaactgtaaatcaataccaaatgtaaatactctactcttaggataagcaccccaatccagtccgggagtcataggacttttgctggctgtacttacttccggatcatatccgctatagttgttaaggcagaagagattttgtccggtagcatatacgcgaagtttggatacatggaaactacgagtccatttatgaggcagtgtatatcctagtgttatattctttaaacgtaggaaagaaccatcttctacaaatcgtgaatacacatcgtttactacgtatccattgtagcgaggtaccttgtttgaagcgtttgtcggactccaacggtctgctacttctgctaattggtttctacgttgtgtattggtttgagttgcatacaaacgggttgcattataaatgtcattgccgtaattgaattgcaacataaagctaaaatcaatacctttatagttgaatgtgttagtgataccaccataccatttaggcaaagcattaccgataacagtacggtctttagttgttattactccatcaccatcttgatctttatatttaactgctcccggagacaatctgtttccaagacttggattgcttgttacgccttcctttaatattaaagtgctggaacccggaactgaataaaaatctgaatattgataaataccatcaaattcatatccgtaaatcagaccaagcgattgtccgacaatagccatataatcatatgaagtgaaattgctatcaaagccagaacgtgcttgcatgtagtttactcctgacgccagtgacttcaatgtattcctgatgaatgatatattaaagttggtttgccaagtaaaattccgagtttgaatattggtgctgtttaaacttaattcaatacccttattttgaatttttcctacgttttgcatttgtgagtcaaatcctgtaatatgtgccagtgattgtgacaatagcaagtcttttgtattcttgataaagaattcagcggttaaatttaggcggttgtcaaagaaacctaagtcaatacctaagttagtagtgtttgatccttcccatttcaaattcttatttctaagttgtttaggatttaaaacagtaacactactattgcctatgccatatttatttgcttcatataggtccagagatagatagttaggtatattgtcatttcctactgtaccccaacctaaacgaattttgaaatttgaaatccatttaatatctttcatgaatgcttcttctgatacacgccacgctgcagagaaagaagggaagaatccccatttcttatttgatgagaataccgtagaaccatcggcacgtactgttgctgtaaatagataacgattgtcgtaattatagttagcacgtgcataaaatgataataacgttttatcatagtaagtactttcaaccttacttggagttgcacctagccccatgttgtcattttccatttgatcgaaagggaatcccattgcttcacctaacaaatattctgtacttttgtaggatacttcgtgtcctagcatgacatcataattatgtttctttaccttttgtttccaggttaaagtattaaagttggtccagcgtacatcgcgttgcatggttgtacgtccataaggttgttcaccattacgatatgcttccttagagccatttttataaaaaatgtcagtgcggctattggttgtattatatgtcccggcactcttaaaagtaagtccttgtatgatctgccagcttacagatgcatttccagaccacatttcgccacgtttattgttagttacagattgagtttgcataacaggattaacctgtgctaggctttcgcctgtttctagcatttccgggtcaatggccgaatgcaataattcttcgtcggttagcttatttccacctgtgggacgtgcgctaagtatctgagctaacatattgaagcgtccggaatcagctgttgttcctacacctttacgattagttaaagcatagttaatagttgcattgaacgatatatttttattaatcctcaaatccgcaactacgcgcctaatatgatacagaagcgaaaagaatctgcatcgttagtaaaaagggggcacagtgcatcgaatgtcaccataaagacatataaatgccccttaccccaccatgcgacttgaggcaatacgcaaaatcacgactataagttgtcggtgttatccaaagtcattctggaacacattggcataagcattgttgcatgaatagatattcagcacatacttccttgatgtcctgacccatttggctggcacagagatgaacttaaagacaaacgtcttgatgcggcttgttgctttgagtccgaacctcttcacgtcaagcctcgccatgatgaatttatagaagttgcgtatgagtgccataagcagaagaaacaccgtgttttctcccataaaggattttggaagcctgttccagccgaatccgttattcatatcatcgaagatgcgttccttccctccacggaggttatagaattcgacaatctctttctcggaagactcgtagtcatttgtaaggatgcagcggtaggtgtattctccttcccacaggtcgagttcgccgtctatccgcttctgtctttgaatcacaagacggtatgccttccctttccatttctcgatgagaatggaggccagctcaaactcaatgccgcccaattccactttcttccaacctctgagggcaaagatgtcattgtagagcgaactgcatcggttagcacggatatagaaggtcttgcagtgtttagcaatctcttccactatctcttcagaacacgagccgcaatcagctctgaaacggttgataataagcttgttttgttcaaacctttcaaagaacctcttcagcgtgtccttctggtggaaacggacatttgtgttgccgtcgctgttctcaatgccgacaatcaagttgccaataaccgccacgccagggcgataaccaaggaacttcttgtatgtaggcttcgcatcaaacttctcagcctctatgaactggtggtcgaagtcaacgtcatacccctcgccctctttcagctgccctgtggacaataggcaattgaggagcagtgtattcagcttgtctgccgtgttgaagtcgtaggtcttgccagtgtcggatgtgtaggaaatgttatcctgggtcagttcctttatggctctaagaatcgtgtcggcactgcatgtgcgaagtgtcggatgaagcgaaaggtggtacatcagatgagtggtgacatcctcgatgcatgagccgccacaaaaataaacgctcataagcgaacggatgatttcgctgtattgataaccatacagcctgcatctcataccgagggttgagtcgattacagatgagagtctggagtcaaattgctccattattgaaaatattcctccaaaaggagtgagtttctcggatttaattgctacctttgccatgtctgtcgggtttgatacatattttgatttgcaacactaagataggtgaaaaatctgacatggcaaattcctgagcaactttttgttgctcaggtacttaaaaagttttatttgtaatagtgttgcggaattaaggttaatcttttgatctatacgaaacttagctgttgttttgtcaaaaccgctgttgttgaagataccgttttctacatagcgagaaaaagccgcattatattgtgtatcattgctaccacctctaagagagaaattatgatcttgagaccaagtcgggttgaaagtctcttcttgccaatctactccttttacgcctacataatcttctaatgaatggtatctaattggttttccggcatcatcaaattctttgtcagaaatgtaactgctcaagagatcattattaacttcaccctgtaatttcacaaattcgtagggagataatacatccaatgttttagagattttacgataacttgcagaaccattatagctaatttgtggtttcccgctttttcctgattttgttgtaatcatcacaacaccatttgctgcacgtgcaccataaatggcagaagatgaagcgtctttaagtacttcaatagattcaatatctgaatttgataaataatcaatgtcgtctacctgaaaaccgtctacaatgtagagcgggcttgaatcacctgtcagacttcctacaccacgaatgttgatgttgaaccctgcaccaggagtaccatctgtagatgtgatttgcactccggctatttgtccacctaatgcacctgctacagaacttgtttgaaatccttcaatatctttggcagcaacagaagcaacagaacctgtcaaatcgctacgtttcatcgcgccatatccaactactactacctcatctagtgcctggttatctggaaccatttttatattaatggatctttgaccattgaattttagttcttgtgttttataaccaatgtaagagatagaaattgtagctcctttttttgcttttagagtaaattttccatcaaaatctgtgatagctcctgtcgaggtgcctttagcttgtatagttgctccaataagaggtgtgtctgtttcgtctacaataacaccttttaaagttaattcttgagcatatacgctgattgtgactatcagtgctaagagggtgaaataccctcttatgcttattgatttaattagattgtttatgttatacataatttctatttttaacgtattagtatttagaagttaggatcgaaccagatgattagcgggaacacctgactacctttttgaggatctgctccagttttatcgaaagtcatctgacctgtgaatataccattaggatactctccgtctaaaacccatttattaggattcaatttgagggcaagcccgttagtaggatcaacatatcctatagcataacttaaagtgtttttatttttctctatattggcataataggaaatagcattcctggaacctgtgttaacccctctaccagagtcttctccgaatttagtccagagagtgttcaggaagttagaagttttaggatcgccattggtaaatgtaccgctaattgccgtatagttaaatgaacgtctgtagtctaaagtgaacaatgataaagcttccgcatctatacctttaataattggtttttcagaataagtactattaccaattgtttttggattaacttggaatacaaatggattatataatacatgaacaccagctataaccaagtcataatgtataaagacaggtacttccagtgagaattcagaatctttgtcttcaccaacagtggctgtaacaaagaagaatcctgaaccatttgtggctactggatctgttgcatctaatcctggccatatagcatttgcaaatgaaatcttaccattttcatctatttccaacttatcacagttctttccgtttctgatactccatcgtacattttttcctgtgatatctgtagtaggagcttctattgtgaatttacttagaatcgtagcagcatcggctgctttatctactgtgattctaaattgattggcattgcttattgcatctaccccaatgttatttccgtagcgtatgaagctaaatttattcggattattcttaacctttaagttgaatgacgcttcttttgaatttttagtattagatgcagtcactgtaatggtatagtctccgtttggtatggtgtggcctttctttgcagatactactccatttttgtcaatagacaactgtttatttagatcatcctttaatgtgaacgtaatcccatctccttcaagtccttcatcaggagttacttttaatggtgatgattcatatatttctacattcacaggatagctaaagtttgctacaggtacaattctgtttactactttaagagtatatacattgttaaatgatactccatctgtagcatatttatttgctacttttacagatattacatattcctgacctatttcaaagccgtgatgtttgtcgacagagagtacacctgttgtcggatcaattttaattttatccgttgatggttcgatgcttttaatagaataggctatattttccaaagagccttttagcattggagcttcacttttgaaagtggtttcgggtccttccgctgtttcagcttctatcaatccttcgttaggttcataagttaatcctaaaggtttagatgtgacattgatagtcaatgcattctcaaagattccttcatcttcagacgatgcgccggtagtgagttttaatgaaagagtatgtattccaggtgcaatatcgcttcctcttacaattgtaatttctcctgtttgggagatattgaagaatgaagaaatgtcactttttgctatttcatatttggtaatagatacatgattaccatcagtcttaacttgtgctgtaggtaattcttccgtgctttctgcatctgaaacaatgctgtattctatttgaatttcattaggttctacagtgatgccatccggtacaggtttcatcatgtttacttctacaatatccttgtactcatgatacgaaccaccagccatacatgaaatggaaattttatataagcctatcggtgtgtcttttgcactattgatttcaatagcaccggtttctttattgataataaaatcactacccatataaggttcaccgtttaatgtgatgcttgtgattgtaaaatcggaaggaacgctccctttgtaagaaggctctgaaatgatcccgctcatagatggacctatatcggtcatgcctaaataataaagtgcgaaaccagtagtgtcagtggtatcctcatctgaacaagatgtataggtcatgactaatacaactgccatcaagacacctaaaaaatgagaaatgtcttttagtaatttagatttcatattatatgattattagatttattttgaagaaagatcgtacactgtacctttgactgtgacttgaatagataccccttctgaatggaacgttccagccgttccatcttcattatcagtaaatttggcatcaactttcagctcctcccgttctgtatcgttttcaaatgggcagagaattgttatatagcgggttgcgctgatttcaataggcgtaattttaggctgacgaagagtgatttggtagcctagacgtataggaccatcttctttgtctgtgtttgtagatactacattggtcacatctgttgtagataatgctttggctgttagatcttgactcgtttctgtaaatgtgccagcaaaaatattattactagcaaaattagtgtatgcctgataatacttattattgtttacagatgtttgcagatttttgtcaaatacagaaggagtatctttatcactaagcagatggaaatttatatttgtcttagtaccaagcgtagatgcgccataaccttcgtctacaatcacaaagaatttctgattaacaaagaatacagttctacggtgggtgatgtcatctgattgttggttttccgtaactaaaatgtctacattatttttagtttctaatttgatcatttttccttccattacgccaccttggccggttggcttagcaactccaatggttttactcataatagtcattgtattatgattaacagttgaagcgtatttagtacgagcagctccagtattgtaggtaaatacacctgcatcagggaagaagttacgatctttgcggtataaaccgaaggttccattgtcaggttggcagtgccattgattggtaggattgtagttgttctttagaatcatcatggttgcatctttatcccaaccgctgcgtaacatataataaccagaggtgctataagctttagttgtgtatgaaggtttacttccgttctttccttctgttgctacccataatagctcattattgtcaggatacatagcagaatattcctttagcctattcaacaaagtgcttttagaatatgaagctgaacgggtatcattgaaattgtctatagtataattagggtaaatcatatccataacaaattctgttgctttctttagtttgctgatgtagctgggagacaataaattagttttgttgttagcttgagctataagatatatttctcggaagtcactaatggcagcagtatgatagctaaaatctaactcatattccactccatcatcattaaattgtgtgtctaatgattcgtttaatccttgtgttccttctgtagcccatgttgatgcattcttaaattccggcattagcatgccagcagtggctacggcttgatattgagaaattaagatattgccactttgataataattcaatcgaatacactctacctctttttcaaatgcaaccaagaaagtagaaagccattccggagtgaaatttgtggaatgaataaaatagggcataatgtctacttgggaaagaactctttctgctacttgtaggcctttccattgatagtctacatcattttcggaaccgccagctggtgggaatatggttccgggagtatatgggaatgtttcgatccaactgccatatgcttcaatccatgattggatatatttttcatctttactaatacggtatgcttttgcttggggaagcatccattgatggcgatgaagttggtatctgaattcttgctcttttttctgtttatcttcgttggcattccaatctattttctttgcagatgcatcatagaaagaataatatgtttctagtttagttacttcatctacactttcggcgaatccttttacatagaaacgatgttcaagtgcttgatcggcaatgcgttgatctttctcggaaattgttgggttaatcaagttgacattagggttgtttacgtctactcttgttctataatactctagtaattcgttagctgcataatagtattctccattttcatagaattttttcactttctctaatcctgggtaatcgaggttaatgatctcaaataactttgagtctacaacttcattaggtttgttttcaggaagtatttctactcctggactaacttcacctgttaataagtcatcatcatcatctacgcatccggtaaaagcaacggttgcgaacatacaaataaagaagatgttcttcatactttattaggttttaattattaaaagttatattttactgtttgcaaaattagcttattaaattatagactacagtctggcttgttcacactttgttcaaaaatgatttttttgatattaaatttgttgaatcatatattacttctgtctaaaaagcctgttacggatctgatagcaggctttttatgtatcataatgtaatctaatctaccagtgtttacaaggttggttttgtacatttttacctcctctggtgaatgatttttaatccataatgatttttagaagtatgaggaatcggagaaatgataaaatctggcttttctccttggggggaaatgaagacctcttctcctttctttaaatcaatttggaaggtgttgtttgggaatgattgtatagtgaagtttctttttccttcaaaaatagggttaactatatcagtcgttacaatgcaaggctctcctgccagacttttaatatggataaattgtgtctttccttgctttctactggcagatactttaaatgccccttccgtgcgcagacctgaataagcaatgtctttccatgtagcggggatagctgggaaaatgcgaatctttcccccccaactctgtaataacatatcgtgaatgctttgggcggcagataaaggtgtctcaataactggcccactttctttatacatagtcgtcgaactaagaaatttaccaaataatttatttagataggctagtgcatcgtctccctttccgatagcagaggaaatggaagatgctcctgtgcatgagtaacctaggagagctgtgggcttgctttgccaaaaagacaatgatttctcaatcatttcaatatcattcggttgttctttattaattaagtatagaggataaatagcaagtaaatgtgaataatgtctgtgtgagaaagcatacggcatatcttttccgataagtaatccattctcgtctgtggggtaaggagtcagtttaagaagcacatttttccatgtctcaatcaatgaatcttggatattcagacgatgggctgattctagtagtgtttggcatccccaacgtagcagagcgaggtcgaaattgcaatcttccacggtgtcatattcgggggagtaagttgctgggagatgaagttttccatcgtctccttctttcaggaaatgcaaatagtagttgattgattcttttaataaaggaaataatttatttcgtaaaatatcatcatccattttatgtcggtagataagccataggttgtgacaggcccatggaagtagtcctacttgagctttgccttttcctggaattcctacttctgtagtcatacattccaaattggaagcaacccctattcctaatgagttatggcggtaagctttgggaatgttgaggcgtaactgatctatatgattgtagagggcattttctaaagaagctgccagatctagatggtcggaagtattcagtgcccaataggtaagttgaacattgagattccaccagacattcggccatggggtttcggttagccacgggcctgtgttatctattagagcacgatcaccacgtgttgcagaggctaatttatacatctgtatccagtagaagttttctttttgtgcttccggcagtgttatgaaactactaggatagaaagtattccaccatttacgatgtgttttttgcatggggtgataacctttacgtatagcttttcggatttcagctttgcatatttcactcgaattgttttgaggatatgtatgtgttaggtttatccataaggtgcgttctgtttcggggttatgtgtttcttgccatccaatgctcgtttctcctcctgccaataatttctggacagatagattgacttctttctcattactgatttttgctgtcggattaagttcgtaatcttttggtattttattggcttttccttgtcttttgaaaatcaaataacgaggactattagcttcagctgctatccattcccattggaagtcatgttcgtctccttctgttgttgcttttactattatcatcatttcatccgcatggacaaaacttcgcaagtggatgactcctttagttgtcgtaatatctgttgaaacttcagcattccaaaggtcaagatgcatcgttccattgattattttgcccttaggatgtagggcaaaatgtccggtaagtagtctagggattccgaatacatctcttttagtgcggtgatcatgtacatcgcagttgcctgtttctaagcgcaagtagttctttccaggttctttataaatcattagcccaagctttccgttacctaaaaaggcggaatcataccaatattcgggtaacttttcccatatcatatcttgttgactcataaattggggccagtcaatatcttgttttatagttgccgggtgagcattcacaaaaagaatgctgattaatgataaaagtaggtaagaatacagtttgtttaaataattcatagtatgctttttcatctattaattaataatgctctctctgcaaatatatagagtatgacaattttacgactattggtattgttgaatagtctttcatttttgtctaatgtttttgtttgtatggggtaaagaatgtatttcttctttaaaggttgaagattttcgggaattagctttcagtattcgttatgtagaatattactccttttagatacaataatgatcttattggctacttttaagtaatagcttccctattgatatttatttcattgcctaatgagttttcgtttgacttaagtcgaacgatagtttaactaaagtcaagctttcgttcaacaactgtcaaacgaaagctcgcttggtaataagataaataatgctaataagagaataaattgaaagctgcatagtaatgtattattatcagtaatagcattttatgttcttttccgaaccgaaatgaacataaatctcaagccggcagattcatattcggaattcactgatttatccttttattttcttaatatactccgtgggtaaacatccgaaatacttcttgaaactcgtagcaaaataagacggtgtattgaatcctaccattgtactgacttctgctattgtatagcggccatccttgagtaactttgctgcttcgttgaaacggatctttcgtataaaatcgatagtcgattcgcctgtgatagctttcaatttaagatgcaggttagaacgactcatattcatttctctggcaaattcgtcagtagagaattcaatattatccatgtttttttctacaatagctacggcacgtttcagtaaagcttcatccatggcgttaaacgtaatcttttccggttccacttccagggatttggaataccgttcaagcatacgtctacgggtacgcatcatattctgtatcttcgtagtcaggatagcaagtgagaatggtttcgggatgtaatcatccgcacccatttgcagaccttccatctggtctttgacttcgcttttagcagacaggataatcacgggaatatgacaggtacggatattttgcttcacattcttacacagtttgataccatccatcacaggcatcatgacatcagttacaatgatgtcaacttcattgtctttcagtttttccaaggcttcttcaccattcccggcttccagcgtattgaagagttctgcaagtccgctgctaagataatggcggatttcattattgtcttctacaataagaatagtgccacgcttcttgtcaccggcttcgatcgtttcgttttcgaccttttccgtatcaatgaaatacatttctttcgagttggtggaatatacctgaccttcctcattcagagtgtcattagaagccaactcggaggatttataggtatttatgtcttgtggcagatagacagagaaagtactgcctttaccctcttcactatccagttcgatacgaccatggtgcaattctaccagacgttgtaccagtgaaagaccgataccacttcctacatgctcactctctatctgataaaaacgttcgaatatttttccctgtttgttgataggaatgccaataccggtatcactaacttgcagtaccagccaattattttcctcttttaatgtcacagtgatactttgaccactttccgtatatttgaaagcatttgaaagcaggttattaacaatcagttccagataattaggatcaaaaagttcctctttatcttccaattcggaatggagagtataagtaatctttttgtggtgcgccagtttatcatagaacaagaaattatcttgtatgagttgatgtgcattctctttctttacttttaactcgaaaactcccaattcggcgcggcgataatccatcaattgattgacaagatgtagtaggcgattagcgttgcgttggatatattccagttgattacgagtccagcggtcactgatcttattgattatttcttgtagaggagctaagataagagtcaacggcgtgcgaagctcatgggaaatattgatgaagaaacgcatcttcatctggttgatttcttcttgatgttccttatccctgcgttcaatctccaactctgcctccatgcttttacgcatccagaagaagcggaagacgaaagtgataaagccgataaaaatagcgaggaaaagcacgattgcccaccaggtcttgtaccatatagggagaacaatgatttctaacatcgtaggtacagtgttccatttcccgtcactattagcagcttttaccagaaaatgataagtgccttgcggcaagttggaataggagacagcacgtttgtctgtcagataataccactctttatcatatccttccaatttataagcgaaagtattgtgttgacctgaaatatagttggataccacaaattcaagtgtaaaagccgtttgccatgattttagcgtgatactttctgtttcattgatattcttagtcaagataccggtttcatcatccggacggactgttttgttaaacagttgaagtttagtgataactaccggaggagtgtaagggttgtccagtaggagttccgggcggaaagttgtgataccgttgatacctccgaagtacatttgtccgttagaggtgcggcagaatgaagaagtattaaactgattactttgcaacccgtcggattccgtaaaattgcggaacttctctgtctccggattgaaacaggagataccacggttggtgcttacccagagacgcccgaaagtatcttccaggataccgtagaccacattattgggtaaaccgttagctgttgtatatcgtttgattttcttctctttttcattaaaacagtagaaaccttcacgcgtacctacccaaatgatgccattggcagcttcataaatgcaattggtaaacatctttgttacagatgattccggaaggataggagctttttctatttcgatcccttcctgctgaaagactgatataccttcttcaccaccgatccaaagacgtttacgagaatctctgaacaggattgtgattcgttgtgaagtaaatggcgtaccgtctttttctttatctatggtggtgaagctccgtttctccggattaaaactaaccagtgcacttaaagttcctaataagatactaccttctttgtcaggaagaatggcatacacattttcattgaccaactggctattcagctgattgaaactttccatttgtccactgttgcggtggagaacagtcagaccaccggcatgtgttcctatatatacaagtgatttttgttcgtctacatatacggctttgatattgttggaaccaataccgatttcccgttcgtcttcctgcaggatatagtgtgtaaactgttgtgtctttggattatatagattcaatccaccatcatttgttcctatccataagttcttattcttatcttcggtaatgcaactgactacattgtcacttagagaattcttatatggaatacgttggatattcttgaatctgttgcggatcggatgataatagtttagtcctccgaaataggttccaagccacattccgccctgcgaatccataaagatactgcggaccgaacgctgtgacagactgccgctttctaccggactactgctgtaagaaacgaaagaatcgtttccttcatgataaatgtttagatcattgaatgttcctatccataggcgattttgcgaatccaatgccagagaacggatataattggaactgatacttttaggattggaagaagaatgatgataagctttgacttcttgtgttttcgggttaaatagaagtagaccggctccttcggtagctatccagatgcgggtaggagattgttgcaaaatggcttgaatctgtttagtgcccgttatcggagtaattctttccagtttcttttgaggaatggagtagctgtaaagcccgtcaaccggggtgccgatatagataatatcgccttgcctgtaaagagcagaagccactatcttatgcatagccgtactaaaagaatcatcaacgaatcgtgattctttaatatcgaacatagtcagaccttcctgtgtacttatgagcagttgttccggtgagatctccgcaataccgttgatttgcagcttcttccccttcttttcgtagaagaaatttctgaacttatccttctcctcatcataatatgacaaaccatcccgcgtgccgatccaaacccgtccctgactgtcagtctttacgattcgcgaaatgtcattagcgatgctgttcggatcatcttcattgtgctgataaactgtaaatgaatacccatcgtacttgttaactccgtcataagttgcgaaccacatattgcctcgttggtcctgatcgatagagaatacagtactttgtgacaatccttcattaatagagatataggagaagttgatttgctccggaatatcagaaaaagcataattaacccctgcgcatagaaaaagtagacagattgctattttgttaaggctgctcattattagttcataagattaataatggcatcaaagatagtgaaatctttgatataccccatgaattggctggaaaactatacaatctttccgccccgcgtcaaatgtcttttttcataatgaggtgattctcattgtcgatacgttggtaagatatttcgttcataatgcttcgtatgaggaatattcccagacctccgattggacgttcctccaaagaaagtgtaacatctacttcatctacttgtgtcggatcaaaagaggctcccttgtccgttaataggaaaacaagttgtttttcgctgtaagttactcttaataggatggtgtgttgctcttgagttggataggcgtacataataatattggctacggcctcttccaatgccagattgatattcattgtcgtttcaaatgacaaagaaagttcctctcccagttcttcgatgaaactggctaaaactgaaatttcatttaaatcgtttgagatctttatttctctttccataatgatatgtgcttaattgtttgttgtcccgggttcatattgaataagtaaaatagtcaagtcatcgctggcttcggcttccttgacatgctctgctatagagtccactataccatttacagtggtacgtacgtcagacgtggtattatcagacaatgtttccaataatttctcgtctccatatagctctttctctgtattttcagcttctgtcactccatcggtgtaaaggaacagtttacttcctttttccaatgtcgtttcatcttcggtataggcaaattcttcaatgacgccaacaaatatctgggtcttgaattccaagaaagaaacctgtccgtccggacgaatcagtatgggaggattatgtccggcattacacagtttcagttttcccgtttccaaatcaaggatgccaacgataagcgtgacaaacatattggaatcgttattatcagatattgaattgttcatatctgtcacaatcttggccggtgaaagcacctgctgagataaagtgcggaacagactgcgggtgattgccataaacagagaagcgggtacgccttttcctgatacatcgccgattaggaagtagaggcggttaccatccatatagaagtcataaagatctccgcctacttctttcgcagggtgaagtatggcgtgcaaatctacatcactgcgttcggggtagggagggaatatcttgggaagcattcccatttgtatttcccgggctatagaaagctcactttcaatccgttctttgctggcagtcgtgtcttttagttcaactacgtaagtagataaagagtgctgcatgaagataagcgaatcatacagatccctgatttcatcgttggaatgcacttctggtatggtaacatcaaatcgtccggtcgcaatttcgcgggctgactcggagaatttctccagtgggcggacaaggcgtcggatgatgctgtacacaatcaggaataaggctatcatccccactataaaagtatagatgattgttcgggatgtactgtctagttcctgaagaattatctggcttggacaaacggtgcatactgaccatccaatctggggaatagttgtataaaatgcatacgaatctactcctttgttatcgaaacgcatggttccggtatgtcctgccagcatttcatgtccgatctgttcctgtgcaagattctctttggcaaaagcttcagagaatatcgtttcgttcatgatcttattcctgtccatgtgggtcaggaaacttccgttgcgactgattaaataggtgtagctggaaggatatggcttcagcaagctaattgtatcagtgaattgcgtcagagatatattggctgtaaagactgcgactaatttcccatcactgtcaaacagcggtttggcataagtactcatgatgaaatttccccctccgtcatcataataaggttcgctccagtaaggttgtttaagcagttggggaatgagataccagtccatgcatggatagtcataattctggctacccaatacctggtaagtgatttcgccgtttatttcatctttgaaggaagcataaggcatgaaatatttccctttttctttgtaataatcgggaacgaaagcgatgccacttcctacaatgaactgattgtttctaacaacagattcaataatattatgtaaagaatccgggtggtctatgtttttttccaatacccaaacggactgctctatggtagtctctaccgacaatagctgaccgctgatttcagttgcaatgttacttaatagtccatgagtacgttcaatggcaaagtccgttactttctggtgactataataataaaatagcgccataatagtagcaaagataatcaacgtaaaggaaagtacgtagatacttagccgggttgcaaaggaacgggaaaaagtgtgtttcatgaatgaatgtgattattttacgaaattttcataacgaatgtcgctggtgtttttgatttgatctggcaacaaaatactagttgccagatcaaatacttctcggcttagccgatagggacgttgcccgctcttcttgtttgtttgtagccgtaagatctcatccaacattttacgctggtgatatctgttggttcctatgttgtgttgatgcacttgttccattataatgtccaatgtttgttcgcggtgttcgtttgcccattcccacccacgtatgctggcacgggccaatttctgtacagcttggggatatttctgatagaattctctgctaacataaagtccgtcctccggcaggttatatccataatccgagaaatgcatgatatgaattgaatcagtctttacaccggcttcaatcagttgtagaaactcattgtaacttcctacgagacaaatatccacagctttcgataggaaaatgttgactcctccattgaaacgtatccattccacctggagttgatatttgttggctatttgatccagtagttcttgactaagatgattccatacccctattttcttatgttgcaaagatgaaatacccttaagtggcgaacgactgacaagcatcagactgttttcctgtgaggtttgcaagatattgactacctgtgcacctgcaaaatattcagtcaaggcatacgataggttcataactaccgcttgcgaataccctttctgcagaaaagaaaaagagcttgccgaaagcgaaggatgtaccacatgtacgtcaagtccctcttccttgtagaatcccagtttgtcggctacgtaatagcctgcaaattgtgcttgtgccgtccatttgggtgtgagattaatggattgtgcattcaccggttctgtcagaaagaacagagatagcaagatactgcaaataatagatgcttttctcattataaatggaattaacgaatgataaaaaggccggaacagcctgtcatatcgaatattttccgtatttccgcacgcatagcttccaaaacaagttgtccattatgttgttttacgcttttctggagtgtaattagacttctcagaccggaactactaatatataacaatccttcacaattgattataatattaggattttgaacgtttaatagaggtaggatgagagcgttgaattcattagtattggcagtatccagtcgtccttcaacagtgagtatgattacttcctctattttacataaattcgttttaagagttgcttccggtttgaaatccatttctatttttttagtcaggattagttcgttttggctgtccgtcgaatgatattctactttatccattgttcggcgaatcaagaagagtcccaaaccttgtgtcagttgctgttccagagatagtgcatttcctgatgcttcattttcagattttgtgggatcgaatgaaataccatcgtcaataatctgggcaatcagtaggccgggggccacggaagttttcaatgtaatttcacctttttgattttgaggataaccgtgatggataatattgcttattgcttcttcaatagccagattgagactcattgttatgccggaaggtaaatgtaatgacatgcctaattcttcgatgaattgggcaattattgagatttcttctacctgattttcgatggtgatttctttttccatattctttaagtagcgcgtcatattataattgttcttgttaggggtaaatgctggtacaaaagtattagtaaaggtgaaaagtctgaaatatattacccccaaatggttcccattttagcaaatctccctatattgggacgctttttgcgagtgggatgctctcgttcttttcgcgaaaagactacttttgtcgctcaaaacaaaaaaaacatggtaaacgtaattgttctctgcattgaattattgttggatattgtgggcttggtattgggaatacttgtttattcacgttcttcagataataatggacttacaaaagcatggggagtattggctatcactctgtcctttcttcttttgtgtgataatctggaatggatgtggattttcagtagaggaggtgaggagacgattccgcgttttactgaagttccgatgaatcatctttcgatatggcatattgtccgggtgattgtcttttttcagttcttttctatttttcctatagcttcattgaagccgggatggatgactttttcaagagtcgtcagtttatgtatccctattttgctgattacatgtatagcttgttgctatgagtttttcaacggtcactatactactctaaaatcttttgcctccattcgggagaatattggtgaacaggatgtacgggtaaggctgatgctgtttgtaatcagtgtaattactccttccgtaaatttcctttttccatatatgagacgatggattcccgtccggcgtaaacagagccaggcaatgtcgatttatatgatgtgttttgctatcatcatgtccggctatatttggctgatgctgggcactagtggattatgttttaacgtattcggctatattgtaatccttcccgtcctttttttgaatatactatatttgcgtaatgagaatccgctttctttacctccccagcctgtagaagagctggagatggaagaaatagaagccatccgggaaattgcggtttcgcctgtcgttcttgaactatccaaccagatgcaaagtctcatgaaacatagtaaatcgtttactaatcctcaatattccttgcaggaatttctgaatgatttgaatacgaatgaaaacaggctcaataaggctcttcattatgatggcttttccggttttagagattatactaatttccatcgtctgcaatactttaaagaacaggcacgtttgcaaaagaatctcactgtaaaagaattaatgtttttgagcggctttacctcccgctccagtttttaccgttattttgcgagtgtggaaaaaatgtctcccagtgaatatatggagatgctcaatagagaaaattaataaggggtgtgggaaaagaatcaccacagatcataaaattagcacggatttgattgtaattcaaagattatcaatgcagaatcgatgtttcttttatgtaatctgtggtgaaacttgaaactaacaggttatttatttagctaaatctcctatttcgtctaaattcttctgaatatcatcatcagtcaatgaatagtttaccaagtcaccggccaaatacttatcataagaagtcatatcaatcagtccatgtccggaaaggttgaacagaatcactttttcttctcctgtctccttgcatttgttagcttcgcggatagctgctgcaatagcgtggctggattcaggagccggaataatgccttcagactgtgcaaacagacaacctgcttcgaaagattccaattgctgtatatctactgcttccatcagattatccttgagcaactgtgaaacgatgacacctgcaccatgatagcgaagaccgccggcatggatatgggccggagcaaaattgtgtcctaaagtaaacatcggtagcaacggagtatatccagcttcatcaccgaagtcatactggaacttaccacgtgtcagtttcggacaagatgcaggttcggcagcaacgaaacgagtcttttttccttcctgtatcgtgtgacgcatgaatgggaaagagatacctccgaagttggaaccacctccaaaacaaccgattacgatatccgggtattcgcctgccatttccatctgtttttcggcttccagtccgataatagtctggtgaagagtaacatggctaagtacagaaccaagcgtatatttacagttgggagtcatttgtgccagttcaatagcttcagaaatggctgttcccaatgaaccctggtaagtagggtgtttagtcagaatatccttaccggcacgggtagacatggatggagaaggggttacctgtgctccaaaagtctgcatgatgctgcggcggtatggcttttgttcataactgatttttacctgataaacagcagcttccaaaccgaaaaccttagctgcataagaaagagcggctccccattgtccagcaccggtttcagtggtgatgttggtaactccttcttctttgcaataataagcctgtgccaatgcagagttcaacttatgtgaaccgataggactgacactttcattcttaaaatagatatgagccggagtaccgagtgctttttccaatccataagcacgaaccagcggagtactgcgatagtacttatacatttcgcgcacttcttccggtatttcgatccatgcatcggtctgattcagttcctgatgacacagttccttagcgaaaatcggatacaagtcttccgctttcagtggttgtttggttcccggatgtaacggaggcataggtttgtttaccatatcagcctgaatgttgtaccagtagtgtggaatttcttcttcgggtaaaatataccgttttcttttttcactcataatattgtagttttttagtttcttgttgccaaaagtactcaattttttaatattcagaaaattttgtcaacaaagaatcggttctaattgttattttacttaagtttgcacgaccctgttaaaaaagatgatatgaagatttatcataagtttttattgtatcaaaataaactgctaaaaccctatgtacgtatcctgttaggactggtagaagcactcacctatctggcatctctgttgttgattgtcggagtagtatatgaacacggttttcccttatccatagatgaagtggctaatttgcagacattgtataaaacagtctggattatctttctgattgatgttactttacatatttcactggaataccggaatactaaaaaacaataccggcgattagcctggatattaagcgggttattatatcttactctagtacccgtcatttttcaccgtccggaagaagaaggagctattttgcagatttgggaattcctgcatgggaagttttatcatctcctgttattactagtcctttctttcctcaacttgtccaatgggctggtgcgcctgttgggacggcgtaccaatccttctttgatattggcagtcagttttatggctattatcctgattggagcaggtttgctgatgcttccgcgctgcacggtgaatggtattacctgggtagactctttatttacggctaccagtgccgtatgcgttacaggtttggttccggtagatgtatccactacattcaccacttccggattagttgtcattattctattgattcagattggaggattaggagtgatgacattaaccagtttctttgccatgttcttcatgggaaacacctccatttacaatcagcttgttgtacgtgatatggttagttccaattcgttaggttcattactgtccaccttattatatatattgggctttaccttagtcattgaagggattggcatggtttcgatttggtttagtattcacggtacgctgggaatgactttggaaggcgagttaggttttgctgctttccatgctatatcagctttttgtaatgcgggtttttctacactttccggtaatttagggaatccgatggtgatgaccaatcataatggactgtttatttctgtttctttgctgataatcttcggtggtatcggcttccccattcttgtcaatttcaaggatattgtattatatcacctgcgtcgtttctggaaattggtccgtacacgcaaactggatcgtcacaaaatgcagcatctttataacctgaatacgaagattgtgttaatcatgactttcctgcttttattaatcggtacattagctattgctgcttttgagtggaatgcttcttttgccggtatgcctttggcagacaaatggactcaagccttctttaacgccacttgtccgcgaacagccggtttcagtagtgttgatctggcatcgttgagcgtgcagactttattggtttatctattcttgatgtggattggtggtggttcacagtctacggcaggtggtgtgaaagtgaatgcttttgcggtcgtggttctgaatcttgtagccgtattgcgtggtactgaacgggtagaagtgttcggcagagaattgtcttacgattcaatccggcgttccaatgcaacagtagtcatgtcattgggagtgctattcatttttattttcacattgagcatactcgaaccgggtgtttccatcatggcattgactttcgaatgtgtctctgcacttagtactgtgggatccagtttgaatctgactcctcatttgtgtgatgccagtaagttgttggtatccttgttgatgtttatcggacgtgtgggattgataacattgatgttgggaattgtcaaacagaaaaagaatacaaaataccgttatccgagtgataacattataataaactaaagatatgaagtatattattatcggtttaggaaattacggtcatgtgctggccgaggaattgtctgcgttaggacacgagattattggtgcggatattagtgaaagtcgtgtagattcaatcaaagataaggttgctacggcttttatcattgatgccactgacgaacaatcattatcagtgttgccattaaatagtgtggatatagtaattgtagcgattggtgagaattttggtgcatcgatacgtgttgttgctttgttgaagcagaaaaaggttccccgcatctttgcccgtgctattgatgccgtgcataaagcggtgcttgaggcctttgatcttgaaagaatcctgactccggaagaagacgcagcccgtagcctggtgcaactgctcgacttcggcacaaacatggaagggttccgcatcgatcaggattattatgttgtgaagttcacggttccgaagaaatttgtagggtattttgtgaatgagttaaatctggatgaagagtttcatttaaaaatgataggcttgaaacgggcaaataagataaccaattgcctgggtatttctctaactgaacttcatgtgaagaatgaattaccggggaatgagaaagtggaagaaggagatgaactggtttgttacggcagataccgagatttccaaactttctggaaagctatttaaaatgtaacagttgaatttaaaactaaataaaatgcgattaaccaaattactattgataacacttttactactggtctctgtttgtgcaagaagccagaaaggcaatgaatttacagtattgcaatggaatgtatggcaggagggaacaatgataccgggaggctatgatgccattgtcaatgagattattcgtttgaaaccagattttgtaactttcagtgaagtgagaaattataatcacactaacttcactgcccgtgtctgtgcttcacttcaggaaaagggacttcaatattactctttttacagctatgataccggtttgctaagtaaatatcctatcacagattctttgacagttttcccggaaaatggggaccatggaagtatctaccgattaactagctctgtgaatggacgtaaagtagcagtttatacagcgcatctggattatctggattgtgcatattacaatgctcgtggatatgatggctccacttggaaagaaatccctttgcccacttcagtggaagaaattctcaaaatcaatgtcgcttctcaacgggacgacgcaattcgtctgtttatcatccaggcagagaaagacctggctaatggttatgcagtaattgttggcggagattttaatgaaccctctcatcgtgactggatagaaaaaaataagaacttatatgaccataacggctttgtcgtaccttggacggtgacaaccttgctcgaagaagcaggatttgtagatagttatcgtaagatttatcccaaccctttgacgcatcccggttttacttatccatcggataatccggcaaaaactccggagaaaataacatgggctccaaaagccgacgagcgtgaccggattgattttgttttctataaaggagatggtctggatgcaaagaaggcaatcatattcggtccgaaagggtctatcgtacgcgcgcagcgtgtgcaggaaacatctaaggataagttcttgttaccgcttgatgtatggcctacggatcataaaggattgttggtgacttttggaagtaaataatccgatttcagcagaagaatgcataccggatttattgcatttccggtttgcattgatggatcgttacaggatgcactttaactttgcatgtcgtagatgtgaaatcaagctgcacaatctggctttgtgatgtttccggttttcgttggtcgaatacaaagttgcccagactataaaagatgggcttaccattgaaatattcctctttctgaatgacgtgcggatgatgtccgatgatagcatccgcacctgcacgaacgagtcggtgtgctccctttctttggtttagagtaggagaggattggtactcgattccccaatggagaataacgaccacataactttcgggattctcttgcttgaagtccttgatttcctcttctatttcttccgtggtttgctggcaaataccgggatcattttctaaatatacccaattctccaaaggaagtgtaactgaattgaagagtgctactttaatttttcctttctttatcactacgggttggcaactctcggaagaagtattaccatatcctatcggagtgattcctgccgataagagatgctgataagtatctgtcaatccgcttcgtccctgatccatagtatgattattcgctaaagccgcatgactgatgccggctttaaccaattcttccatccatctcggttccgcgcgaaagatatatttcttgtgtagcggcgaacgaaccgaagtgacgggacattccaggttgattaccgtagcgtccatttgatgaaagagaggagctaccgacgcaaataaatcttcgacacctccccgttgaatctgttggcgtacccctctgtccagaagaacatctccggtgaaagcgatagagagacattcttctgacgggtgctggcaggcagtaagcaataacagacctatactacctataatccggttaatttgggaaaaggatattagcatcctgaactataaaaaactctgtcatctactttaggttctttctccagtaggatatttttcatccattccgggacggcaggtgctttcttttcttccagcattttctgccactcttcgtccgtgagccgggtatccagtggctggacaaactcgtagtaactaaatgtggcaccacgggtaagatagagattaccctctatttctactaccacatagatattgttggcatttcctgttgccacatgcagtactccatttttatcacatcccctcacgttgcgggtataaatatcagccactacagctatcgacttgtccggaccttgcactaatgaccagttatccagatgtaaatcaggatcgagcacagacagagtgaaatattctatactacttcccatatactcaagagtgcgatattcctgttcggtcagtttttctccccgcagttccttttctgttacttgaatcagaaagctgacatagtcctgcaactgctctgtttttcctttcaagtcatccgtcaggcaattgctttgttgcagaaccagttgggtggcttgcagaatccctgacattttcttccagaaaggaagattcggttctacatatcccactacgatcggatcaggaggtccggcacctccacattctgcagccatgggctgttctccgtaaaggatcgcgtcatgcttcaattcagcccaagatgccagagctgtattcaggttcttgtatccccattcgggtgtttgcataaatcccggctggttcttatccgttttctgcatggtgaacagacttttcatccataattcgtagacagatacttgtgcaggctgggaagctttgaatttatctttcagtttttgtaattctccggtatactggttccagttgcccgcttctttgtaaaaatcagtcagtaaagtctcggcggagtttactccgaaagcggcaaagacatccaatcctttcggataagcacgtttgctgtttggggtgacatctaccaattcctgaagtacttcattatctgccagatatctttgtggcataaagttgattttgtcccggcaggagatttctattttaggtttgatcctgttcttgctttttgccagttcaatgagcgcttgattcaccttttctatttgaaccggagtcaatgcatcttcagtatattctgctttatttttcttcagaatctgtgcaatatcgagaagagaaagattatcagtctcacccatcaggaaagtaagtggtgtatagacgcgttggtatagttccattagtggtgtcctggtcatatccttataagtagatagtacggtagcctgaaagattgcttgtttgagttgttcttgttgttctctgcaaaaacaggcagtttgaagccacatcatagcctgaaagtatgcctgtaattggggttcacgggtataatgtccgcgtggtttgaaaagactgtatgggaagtatgcatctttgtatgaaagaaactccgagaaatcatcttcttgtgcattaatatgttctatttcctgttgatatgctttttgatacttagcagggagattgggtgtttcctttgtcagcaaataataagggatagcataaaaagtagcggcatattctgctatatctttcagagattcgtcttctgtctggcgggagatgcttatgcaagttgcgttgagtgatagacatagtctttccaaagtaggaatgatgtgttgtttctccagacttttcagtacataagagaaatacatgtgaaatgcctgtaaatataagtcagtggtgatgaaattgggcacttggcgataatcattttcttcgtaagcatgaaacaactgtaagttacttccttctgtaatggcaaagttgttctgttgcaacttggctagtaatgcctcgtctatatctttgaattggaacaggttgactatattatttgcattttctaaataataagagtctcgttgagtaaactgttgctgacgcatttctgccatgcgagcatcgatgcgttctacgaatgccttctcttcagccgtcagtttgacttcatcatagttttccggaaatttattctctccgtctgcctccgattcatcccataacttccagacaagatcattataccatttcgtattggccgagaagaaagcattgatgtccgcttccataaaatgataaccatgtatagcgtatggataactacgtaataaacgtaactcctgaaaagagaaacgactgatatcctgcttcaaatcaatagattgaggtagaacagtatcggtcaataatgaggtggtagtcataacagtatcttgtgccgatgccgttgaggtgtttttgttcttgttcttgcatccgcagagaataagaattagtgtacaggacagtaataatagtcgtctcatgtttttcattattctataaattactatatataaatgatagtatctaacgttaacgttcaagaatgcgtttggcctccttttcttctatctcgcgtttcagatatcccttaaaatccagaccaaaacctctccatgcatattccgttatcagaaattttccacttcgttcccgttccatggtgcgtatcaatacaggagtatgttcacgaatcactctaaaatcttccaaaggttgtgctaccctcgaacctaaccaaagtgggcggatatacgcttcatctgcaatccggtaaatgaataaccgcttatcaggtttgggatcgaatcgggtaggcttgataacccccacaataatttccggcatcccgtctcctgtaacatctccataatcaaattgatagacagggtaaggcaatttccaaacagagtgggagggttggtctgtattcaaatgaatgacatagagcgaatcagattctttgttcagagatacttccatgtgtctttgatttacttgccattcaaacctgttttctttccggcatgaacagaacatcagtaaaagacctgtaaaaataaggaagtgaatcctgtgcgacatatctgtaacgttttctttggcaaagatagatattaacctgtatttacctgcttcttttctcgtaaaagtgaaaagtccagtatattatatatgaaaaccaccggacttctctttagttaagaaatccggtggcttatcagattttataaagcgtatgccttatttcgtttgaatacgaatatttccggctttcactccatttgctttggctgtaaatacaatttctccggcagtttcaccagcttgtatgatagctgtcaacattccgttgaaagcatgcatctttggaagatggaattgttccaggttcgtcggatcgccattggcagcagcacgatatttaccggctccctttgcagagaagtttatctgacgattatcagtagggcataggttaccatctttgtctacaactttcacagtcacatacgctaagtcttttccgtctgcagtcaattcgttacggttgctgaccaattcgatgtgatgaggttttccggcagtgcgaaccactttttccgctacagcttttccatctttgttataggctactacttttacttctcccggttcatatacagcatccatccacatcagacgatagcggttcttcaacgaactattattcttgctttgtttaccataacttttaccgttgataaacagttcggctgtaggatagttggtatatacaaatataggagtcacttcgccttcacgttccggccatgtccagtgaggcagaatatgcaaggtttccgcatccttgttccatacactgcgatacaagtaatagcggtctttaggcagactggcaaggtcgataataccaaacatggaactgtgattgggccatgcatccgtatcataaggtgatggttcacccagatagtcaaatcctgtccatacaaattgtccgattgtccaatggttatcgtcggccagtgcaaagtcctcatccggaatatttgaccatgaacaggcttctacatcataagaggaacattgatggtcttcatatttggtacttttcttatcctctaccgggaatttgtataccccacgtgaactgacagtagaagcagtctcactacccagaatcagattctgcgggagttggtcataagattctttatagcgttgggtacggtaattaagtcccggaatgtcaatcatggctgcaaatccgttcgcaagtacacaagtaacctgatccattccgcaggtgacaggacgtgtcggatcttctcggtggcaaatgtcttgtaggaatttagccactttatagccgacagggctacattgggttggcacttcattaccgatactccacataatcacacacgggttattccgataattatggagcatatttaccatatcacgttccgcccattcattgaaataacggtgataaccgttttcacacttggcaatgtcccattcatcgaacggttcaatcatcatcataaatcccatttcgtcacacaacgctacgagttcgggagtcggcatattatgagaagtacggatagcgtcacatcccatatctttcagcaatgtaagttgatggcgaagcgctgccacattaatagcggcacccagcggacctaaatcatggtgattacataccccttggaatttgcgatgttttccgttcagatagaaacccttatcagcgatatattcaatgctgcggataccgaaacgtgtcgtgtaagtatccaccagtttatcatctgcgtaaattttggaaacagccttgtagagtgacggactttccggtgaccagagttcgggcgcatttacaataaagttttgttcgaatggttgtccgtgattaatgcggctcgtattctctttgctggtaaccacttttccgtccggagaaagaatctctgtctctatacggatttgtgttttctcaccggcattatcaatcttcgtttgaagacgtacggctgcaaagtccttgctgacatgaggagttgtgatttgtgttccccatacaggcacgtgcactttatcagtcacgatcagatgcacattacgatacaaacctgctcccggataccaacgcgaggactgcggacgattttccaaacgtacggccagcgtattattctttccgtctttgtttaataaagacgtcacgttacagtggaaagagttgtagccgaaaggccagaaacaagcttcttttccatttacatagacacgtgcttcgctcatagcgccatcaaagagcagcgtcacctccttatcggcaggagcatcaaaactggttcgataccatccggtgcctacataagggagcccaccggtacgtcctgttttcaaggaagcctttttctcgaagttctgtgttacagctacattctgcaggtcattattcatatcgaatggaccgaaaatcgcccaatcgtgcggaataacgaccgactcccatttagtgtcattaaactccggctggctagcctctttaaaatctcctttactgaatttccagtttttctcgagcagcgtctcactgcgttgcgcttgcaatgtgcaagcggcacccatcaaaagtacagctaataactgtttttggtgtttcatgttaatttttgcttttcaggtataaaatattttggattcggggtaaagttataaaaaatgattcaataatcttatctcttgaaagcattaaatgcgttagtcggtttaccactatcgtcaaacatgccctttccatagttcttccaaccaccataactctgcggttcccaggagaatacaccaagacattgttccacttgtttggctttcgtcataaagtctgtgaaaaagtcttcagcttcggaatagtcccagggaataccaatttcgcacatcatcaccggagtgttgtatttggcaatcagatttttcatattggcaatacatttgttgttcatatcttcccaatcatcggctactccctctgtcgggtacatatccggataaagagacatgccgatgacgtcccatttggcattgttgtcatgcaaataaccgaaaatccggttgtatagattggcatcatttccctggtcgaggtgtacaatcactttcgcattcggataaatctctttaacagcattgtagccggagttaatgaatttcgcaaagtttttaataccgtcactactcgttgtttgtccagtggggaatagcatgccctgatgagtttcattgcccacttgcacccattccacatcaatacccatctctttgattgcaccgagtacatctttggtatggtcggcaatcgcctgctccagttcttctaccgtataattttcccaggctttgggtttggcttgttgaacaggatcggcccatctgtcactgtaatggaagtcgatcatcaggcgatagcccaaattatgcgctctccatgctttgagcaatacgtcacccttattgcaccagccttttacatcttccgtgtcattttctgggttcacccatacacgtagacgaattgcatttatacccaggtcacgaagcagagacatacattcctgttcttttccatcggaggtatagaatttatatccggaactttccatttccgacagccaactgacatcagctccccgggcgaagccggacatatcataagtggtttccgtcttttccgggaaattcggagtatcattatcatcatcacaagcggtgaagatgcttccgcaaagtagtgcggaagctatcattatatattttcgtatcatagtgattctgttgaaattaataatcatgttgttgaacttagaatgttattcagtgatttcagtcattgtaaactccatcttgttgagatccagcgtaatgcgatatttaccctccttggcgggtttaatgttatcaccattctgatcacttagatagagcccactttcagaagtatagtacaatctccagtcccagttaatctgatcgggatccgtattcatgaggaagtagaatccgtcaccgatggtggtgatatcgcattctgcgctccatattccggtttcctcatcatatatcatcaggtctttagctgttgaccagccattgaaagttccatatacattgatttgtttgatttcagtaggcttccaggtcaagttgacgtaatctacttcgattgtataacttttcttgccggaaccatcgaaccagatgttgtaatgctctcctgttgtaagagcaaggctataaagattgttgggatcagagccataccatgtgtctgttgatgggtctactatctggaagttttcattgctgacggtttggaatacagtgcgataagttcccgcagttttaccgggttcaagtttgcggtataactttccccaccatgagtcggcaccttgcatttccagataagagggataagtcggttccacacttcctccttccgtcacttccactttccatgcttgcgggtcgttcaggtcaataatcaatgtacattctccggctgctggtacgtttactgtaatatttccggcagaaacatttgttccggtattgaatgtcaattcattagcagaaccattaaaggcgaaaggagtatctttggctttcgtatcatcaatgctgttatcagctccactgacactggtgttatcatatagtttacctgttccattcatctgaatattgatagtgccggctcctgtagcagtaaatataccctgccattgattcttgtcacgtttgtattccattgtaatacctccgtcgatgccacttacattgagtgttggcatccataaagcagtccatagttttttggtggtattgacattcgtatagtaacagcctgattgaccggggaaccacaaatcccacgttccttcagcagcatcagttgtcaggaagaacggagtagccgtactgcctgatttggctgtgtgccaaacagtaccatcggcttcctgtagatagaaaccctcccaagaagtggctcccataaagccgatatagttgccatccgcattggctgcatacagatcttttcctgaatccttgccgtctcccttattgataatattggcaaatcgcatatcaatttcataaggagtaaccatgacttttaccacattactgtatacaggagcgatgttacttccgtttcttccggcaagccggaaatagagcggtgcttcttcttcgggagtagctttcaactgataagcgacgatatttaaggcggagacagagtacgtctttgatactccactttcggtcgtttccagaatctgcccggagaaatcttccgtgcgtgaaacctgtacggaagtttgtacaccgctggtaggctggtatcttgaatcgctcacttgcagcgtctggtcagtccaggcaagcgacaaagcataaaacttagctgtctcctttgtcagtacgacagaactggcagaagctatcaattcgttctcttccgggctggagagaaaataggtatccccatctttctcgcaagcacctagtaataggagagcggaaagtaaagtgaatagattatttagttttttcatatcgttgttccgtattaatatgattaatagttttcattgtataagtttggattggccgtcagttcggtagcaggtatcggatagatattgtatttgctctctactgccttaccgtcttttacgccacctttccattgccatacatagctgttggttgtaaattgattgaagcggatcaagtccgtgcggcgatacccctcccaatacagttcacgggcacgttcgttgatgataaacagttcgttgatttcagactcgcttttgttatgagtgttgtcgccgaaagcacgttcctgtagctcattgatataaggcagtacatttgccagagttgcttccgttcctccacgtaccacagcttctgccatcattaaatatacatcggccagacggaataggggataatcagtatttacaccaccgtctgcggtgttggaagcagtctgtccggcatcagtcaggttagtccatttttctacgaaatagccattgctttggtcatctatcttttccaggtcccgggtttgtccgtcggtaaagaacatatatcgctggtcggcttcttcgttacctgagaaaagttgaggaatttctccgcgtacacggaacataccccatcctgattttacaccgtaatcttccggtatctgtttttcggacgtgttgctcactgcgccacaaacaatgtaagtggatgatccccatgacacgagattggttgcgtctaccgggagggtgaagattatttcgttcgtacgtttgtcattgtcggcattaaacagcttgtaataatcgctttccagttgataaccttgttcgataacctttttacaggctttgatacattcgttgtatttggaagtctgggtataaacttccgcattcagatataatttggcaagtaatgtatatgcagctccttgggaagcgcgtccgtaaggacagttcgctttatttagcatttcatctttaatggcattcagttcactttcaatataatcgaaaatctgctgggctgtatagcggggaggcagatatccgactagcgggtcattttccgtcacaaacgggatattgcggaacagatcgagtgcgtgatagtagaataaggcacgcatgaaacgggcttcggcacgataaatgcgaatttcagtctgctcctggtccgtgaactgtgctatcttttcatcggtggcattgcggagaaactcattacataaagcaatgttgtaatagatacggtaatacatatccgatacccaagggtcgttagcgtcccaactcaaatacgtcagtcccgtcacgttgtcaccggacagccaggtagaagccacttcatccgttccacattcctgcaagttgaagaaacagcgcatataatcctgtccgctgttactactcaaatcgttgtcaccattcttttcctgtccggtggtcaccatggttgcatagatttttcccagaacggctttatagtttgcagcactggtatatatggtagaagatgtttcttcttcgtgtggatattggtccaagtcgcctatgcaggaactcatcaggagtgcgctgcaaaaataaagggctgtataaaatatctttttcataatcgatgcttttagtaattagaagttaatacctatgttgagagagaaagtacgtgggcgtggataaaacgaattgtccacaccgttgggaacttccgggtcaacgccgctgtatttggtgatacagaatacattttgcaccatggcactcacattcagactgcatcctttataaatagtgccgaagttgtaacccaatgagagattatccattttcaggaaagaagcattctctacatagtagtcagagaggtattgacgtgtctggaatcctgttttcaggtaggttgatgacaggttgttcagctggtaagagttgtagctgacagtttcccaggcaccgctgttcatagccatcgcgttatagacatagtttccgatattggcacgcaggctggtgctcaatgtccacttcttgtaacgcaatgaggtactgaaaccgaggatatagtcgggagctggagagtggtagcggtacaagtcgttcgagttgatttgtccgtccccgtcgaggtctacgtaagctccctctaccggtttgccggttttttcatcatacagttggtggtaaacgtagaacatataaggagcatatccctcgctcaatgtctgtacctgataactgtcgatatatggacctacggaagtattggtggcaggcgtaccggctgtcagtgataagtttttcactttcatcttctgccatgtcatgttgaaactcaaatcccagttccagtccttggtctgtatgggcgttgcgttcagactgaattccacaccctgactgtctacatttccgacattggtcgtgatgttacgatcgaatgtagtaccggcagcagcaggtacggtggcaatcaggtctttggtctgacgggtgtagtagtcgaaactaccggtgatgcggtctttgagaaaaccgaagtcaaaacccacattccatgaagtggttgtttcccatttcaggttgggtacatacgctttggggcggtaagtaggagtcggagtaccaccgataagagagcctgcaccactttgactgatcgtatagatagggaggtagttgtagttacctataccgtcttgctgcccggtgacaccataactggcacgcactttcagcgtactgatgactttattgtctttcaggaatgattcttctgttactctccatcctaatgctactgacgggaacgtaccccaacgtacatttttagcgaagcgcgaagtggcatcgcgacgtacagtagtagtcagcatatagcgggagttgaacgagtagttcaaacggccataataagagagtaatacatggcgttcgtcagaggctttcgatgttttctgtatttctcccaacgtgttcatttcgctgtaaagcggagtcgtggatttccagtactgataatcgtaaccggctgtaacatcaaaactacttttaatggattccaccaatttgttgtagttggcatacagagtcaacaaacggttttcttttttctgtgggccatagctgtaatccaaaccggaagtggtgtaattctgtgcagcttctgccggaacatatacacttcctttaccttgtgcatagtcataacctaacgtagcatgcaatttcaaatcggggaaaaagtgaagacgatagtctgcatcaatgtttccgataaaacgttttactgtactttgtgagtcattcatattgagaagtcccaccggattcatgactgctccgttcacgggagcaccggtgttgtcaatcgcttccgtatatccgccgaatgtgtctagacccgaatatactggaatggtaggattcatggtcgaagcagcccaaatggcacttgtattggcaaatgtgttcttattgatagaacctttagcattgatattcagttttaagtggtctttaaagaaagacggattcagtgtgatgcttccggtgtaacgctccgcgttgtcagtacgtaataaaccactctggttgtagtaaccgatagatgcacggaaaggtaagtttttggtaatctttccagcaacacttagattattgtccgtaccgaatgcattctgatagatttcatcgttccaatccgtgtgtgccgtgccgagtaacgcccgttgcgcatcggttcctttgctttggatggtattgacaaattcatcgtagttcaacatatctgccaatttggtgcgggtttgtacagagttggtcgtactgaaagtaaatttcagtttatccgaacttcctttcttggtagtaatcagaataaccccgttggatgcacgcgaaccgtaaatggcagtcgaagaagcatctttcagaatggtcatactttcaatatcgttcgggttgatgaggctaaggaagtttccgtcattaccactgatgcctccctgttccaaaggaacaccgtccagtacgatcaaagggtcattactagcgttcagtgaagcaccaccacgcacacggatcgtgcttcccgcagtgggagaaccactgttggacatgatttgcacaccggaaatcttaccattaatcagttgctcgggagagctgaccaatcccatgttgaagtccttgctgctgacgttagttaccgaacctgtcaggtcacttttacgctgcgtaccatagccgattactacaacgtcgctcaatacctgtgaatcacttttcaactgaacattcaaagtagtactgttggcaggaacaggtactacctttgtttcatatcctacataagagaattgcaactctttgctgccctgtggcacattgagtgtataattaccgtcgaaatcggtcactgttccggtagaagtaccgacaatgaggatacttactccgatcatcggttccttgttctcgtcaatcacttgtccgatgattttcttgcctccttgttgggcgaaggcaggaatgatgcctcctaaaaaggctgtacacaacataagtagtacagtcagatggcgtagatttaagatattcctgttcataattactgtgttattgataatagatttatttttactttttatttaaaaatcagcggcttttctctttctgtcccttccgtttgctaccccctttcagaaggcttcagacgtggttcagacgaaagatttgttcctcaccgaggaagaccttgttcctcaccgatgaacgaccctttcctcaccgaggaacaaaggcttcgacaacggggaactttaagaacgattattccagccagatatttcctagttcaatttcaactaactctttcttgtttcctgacattgacagctccagcttctcaatcttttccggtagaaaagcgatttccgtttccggatggaaatactgtttcaagaatgtcggataagctatcggcagcagtaccgtgtctgtctggcgtaaatctttcaacggtatccgtatgattccctccgatgatggagcaggacaagggcttttataagtatatccgtctgacgttacgaaaccggcactgagtccttccggaagtgctttcgtgcgatttacccggatacagagaacgctacaatcctttactctttcttttctttcttcaatcaggttctttacgaacgtgcggaggaaatagtgcggattttctcctttaggagtaaaccggaaccggagcaaaggtttttccaccggagaagaatcaaccaaagtacgttggagatcattccattcgggaagcgtgtatgcttctatccggctatctgcgtccgtaatagtcaatagtggtatcgcactatctggggcaacaacacgagtagtccaataggctccggaagtataattccagtccagtggattttcctttattcccgatgatgaattcctgtaaccggaatttcctgtgggataagtgcgagtgctgttgccccggcatacgatgatgttatacctgaaacaatcatcctttatttctgtagcgggtatcgttgcctgataggtatatccgcctgtatgtttcatcttgatatatggattgtgctcattccaaaaagatatcttatcggtgtagataatcacagaatccgggaattcggttcctaccacctgtgcactaatcgtcaaatctttatttgcttcagtggttgccgatggagtatgaacgactttataatccgtcacacgtggagcaggagccacatattctccgatgcggatggaattccattgagagtctgcctgccagttctgtttgggcgtacagtttttacgtttcagcagataggtacccggacaaagtccgcggataatcccgtctgtcacatctcctttctgctgatttccttgattgagggccgtaaaggtaaattccatccctaaatcaggtatttgaagagccatgtcccaagcaccataagcaatggtaaccacttctttatcgagtgacggtttggcaaacggatcgttcaccactaccgcgtccggcatcacttccagtctccagactcccggttcgaggcaatccatgaaataagtacctgttccctcataacgaataatcggagaactgccacaaccggcaatggaaacaagttgtgacgcatctttgggctgggtgttggtataattggaataatagaatttctttccattatttaattcgctcaagtcctctgtataactgacacgaaaaccgtcaccaaataaagtgtcctgtggataactgccgtatgattcacctcttttcagactgcgtgcagcttcggcggctatcttcatactgatggctttatgaggcgtataggcaagattcaagaaatgagtctgatattccgtattggcataagcgatatccatcggatcatacgcaaactgggtaatccattgaaaacctgctgtacggaaagtgcgtaccatggccggatacatataagaatacatgatatctgccggatcgaactcatataccatccgtgttttcttatcgaatcctttcactttatcggaaaagggaatatcatagcggtctatatagggaaggaaatttccctgctgtgtctgtccagataccagtccgatgggataccattgataagtagttccctgaatggcagtttcgtaataagcctctactacatatccgttgtggcttacattatagaatacaggtttgcggtttcctgttttattgatcgctttcagcatccggttgatataggcttttacctctttcttcgtaccggaatgacaaggttcattattgatttcgaacccaacaatggagggatcgtctttataagctaaccccgtatatggattgacgtgcttcaccaaaccatgaagataggtttcttgtgcagcgatagcttccgggtgggagtgcatatcgcatttatcatatttataggagaagccgcccgtctgtatgtttcgttcgggatatccgttcccgaagttggtctgcgcggtaatcacaatatgaatattgcgttctttgagtttggcaatcaggtagtccatcaagtcgagatgctcgttttcgaggagatttccctgtccgtctgtcagttccacatcccataaatgaatacggtaagcattcagtcccagacgggagatatgatatacatctttgtctatagcagctttgcggtccagttccaaatatccaatggcacggtaagcatgggcgaaaggcagcgtataattaacaccgaaaaaggaagcctcccggcgggtgtcactccaacgcatcaccccatttccatctatatatataataggtgtagaggatgatttgccttgcactttgacaaaggcagatatcaaacaaataaaggtaaggatcaacagtcttttcatgctatcaaatttatcggtttattgacagcaacaaaagtaatttattggtcatttcaataaaagcacagattggacatataaggataaaaataggacgaaatgccccaaaatgcctctacaggtcttcattaaggtactggcgtggcgtttttccgaattctgcctgaaaacatttggagaagtaagagtgattggaaaagcctaccatgtacatcacttcggcaatggtaaatttcttttgttgcaacaacatggccgcctttttcatccggatcgatttgatgtattccactggagacattccggtcagctgtttgattttccggtaaatctgcttattgctgataccggataattcacaaagtgcatttacattcaattccgattcagaaagatggtcctcaatcaggcggataatgttcgacagaaatttctcatcttgagattctgcttcgattggtttaagaacaggcaacgattccaactgctttttcacctgtgtcgccggaatctcttctttctctacggcgatgacagggatattcaggccaatggaagttccttttccttcgttcgaggtgactccgttgatgtgaccgccatgaagttccgtataagtcttgaccagataaagtccgatacctgtaccttccttattgccggaatgtggagactggaaaaagcgctggaagatatatggaatatcttgttgcgggattccgcttcctgtatctgaaacacagatatccaacaatcccgtttcttcacgatagaaaagagacagacggacgcttccgccatccggggtgaatttgacggcatttgaaagcagattatctaaaatcactccaagtttgatggcatccatatcagcataaatcttggctttattcgtctcgaaatggaatgtgatctgtttgttttcctcatagacagaaaacaggctacggctgaatgacacaagttcgatgcgcgacaaaatcagcagcgaatctttattatcctctatccggttgaagtttaatacctgatgaatcaatgagtttattttcattgcattacgctgtacctcctccagtgtctgtttctcatgcacttcttctgcaacggggagcaattgactgacaggagcgataatccggctaagcggtgtctttaattcattagacaaattggtaaagaaagccattttctggcgtgattgttccagaatcttctctttttccatccgttccatttttagacggttcttgacacggaaaaagttgataacccaggcaatgaggctcaagaataaaagaatgtagattatctttgcccaaagtgtgtaataccatggagggagaattttaatattcaggatatatggatgctcggaaggagaaccgctcttttctactttgctgattaccagcagataatccccataacccagattactgtacgtaatgcgattcgtgttggattgcaggaaattccattctttgtccataccttccagccggtagacgaattcatgtttttcttccagcgagtaggggaggtctgaaagttcgaaagccaggttgttctggtcgtattttagttcgatagcatcggtataacggatgttgggaatattctctccagtatgcggagacatcagttgattgttgatatataaggcagtcagtaaaatggagtgttccggctgactcatggcttgtatttcgggacgggatatgccgaacccgtctgcacctcccagatagatatttccatcttccggatcaaacattagactggtgaaacgtttatccgtcaggctttgctggcgggcatccattgttctccggtcgatgatccaaagtccgttagtggtggaaacccagatatgttcttttacagaggtcatagacagaatctcgttattgctgaaattgccgaaagagatactttgctgactcgagtctttgggattgatacgcatcacccctccgtgaaatcctacccaaagcatgccgtcttcatcccgtaaaaggtagttcgggctcttctcgccacttaattcatcggcaaacagctttgtcacttgtcgcgtacgggcattgattttgtctattcctttgctgttgtataacaatacccatacattaccttccgcatcagggacaatctgattaatgaacatccccgacagcccattatgaatggaataattttgatcggccacatacgattttccggcagattgtatcagtttatgtttgtccacaacaaagatacctccgagacaggtggcgatccaaagcttcccgtcagtatcttcaaacaggtaataagcccagttggtattataagttcctgtactgtctacgatgttgtagtgtacaaattgatgggtattatagtcatagcggttgatacttccgtctgtggctatccataactgctgttctctatcctcgtagatgtgtcgtatccggttgtgggataacggatggtttttatcccccattctataccagatagcatcgtgtttattgcctgcaggatgggtgaaccggatcactccgtttgtacctccgaaccaatagaatcctttggaatcccggaacagggaatagaactgatttccgtctcctgtgcctgtgatttgagaaatcggtacaaattgcagcgcactgttatagcgtgatagggaaatgccataatctgttcccagccagatattatgttcctgatccgagaatatgttccagataatattgttggttagtgactggatattgcgtgaatcgtgaatgatatgctgcaaaggttctttgtcattctggtacacataaagcccgttgtctgtacctgccagcaaattttcatctccgtccagtgccagtgatttgatggagttgttatgaaatacctctatcgccttcatctctcctatagtgggattgtattggaagagataaccttccatcccgatccagatacattgtcgggtggtgtcttccaacagagaattgacaaacaaattgctgcctccccggttaacgggcaaaaggatgttttcaaattttccacttgcctgcacatagcggcataatccgttgtaagtacctatataaatttgattatcttttgtatgaatgatggaatagatggtgttatgaggcaatccggtctgtttgctgtcgaaatgattcagttgacggctttttaactgataagtatataatccgttcaacgaacctatccacaatgtatctccctggagtaccatggtacggacatccgttggaaaatcagtatccggttgctcatatttgtctgttcgatagttataaacaagaatcccgttatctgttcccagatataaataagtgttatctgctataataccgcagtagatacgtgtgttagtacgttctccatacgtgaaatgctgttgtgtggaataaccgtcataactgaataaccccttgttggaacccacccatatcagtccctcgctatcttgcaggaagcaactaatcaccgaagcttcggccccgagatagatgttgtcgaattgctgataatttactttttgcccatacacattgccactgctacagtaggcaaggatgagaaaaagaattgttgtaattcgttcgcgcatggtgttaggtttgcaggtttttaaatctgtaattgttgtaaaagtattccttctttcctgcaaatgtaggaaaaatgtcggttacacttgtaaatatcccgctctttttgttcctttgctatctatttataaacagaaaacttacgtatgagaaaactaatttattggcttttattgccgttggcagtggctgtgagtgcatgtggcggtaaaaaaggatcttcagataatacgtcgacattggcgatgatagacagtgtggatgctcacggattgcagcgtatgcagacgtctaagagcgaaaccgactttaaatttaaggggaaagattatcattccctcgtttcgcgtactccggatgaaaatctgccccatgtgacaaacgagctgggagatacctatgtcgacaataaaatagtgttgcacctgactcgtggtaatgaaaccgtgttgaacaagacctttaccaagaatgatttttcatcggtagtcgatgcgaacttcctatctaagtctatattggaaggtattgtatatgacaagactactccgcagggaattgtgtatgcagcgagtgtttgttatccgcagacagatttgtatatgccgctttccataacgattaccgctgatggaaaaatgagtatacagaaagtggatatgcttgaagaagattatgacgatgaagcacctaattaagcttgtaggcgggtgttgacagtaaaattacacaaatgtgaaaacatttgagacaaaagaaaggcagccgatgaggttgcctttcgtatttttgcaccgtcaacgaacttaataccaaatagaatgaagaaaaacatttttgctatctgtgtggtagcagtaggatgtacggcactgaccgctcaaacccaagatacacaaacgttggttccgcttacggaacgggtaaacgtgcaggcggattcggcacgcgtcaatcaaattatagacgattgctgggtagcagtagggactaaaaagcctcatgcaattcaacgcgacttcacacgtatgttcaacggtaagccttcctatcgttttgaattgaaggaagatgataacaccctgtcaggatatgccaaaggggaaacaaaagggcgtgcggaattttcttattgttatgcaacttccgatgatttcaaaggcctgcctgccgatgtttatcagaaagcacagattaccaaaactgtatatcatcatgggaaaggtatttgtccgcaaggagcttcccgcgactatgagtttgccgtatatattccttcttcattgggtagcgatgtctcgacaatttttgcccaatggcatgggatgccggatcgtacattggtacaaactccacagggagaagtgaagaaacttacgattgacgagttcgttgaactggaaaagactacaatctttaaaaagaatgaagggcacgagaaagtagccaagctggataaacaaggtaatccggtgaaagacaaacaaggaaatcctgtatatcaggccggaaaggccaacggatggctcgtggaacaaggaggctatcctccattggcgttcgggttctccggcggatggttctatatcaaagcaaattccgaccgtaagtggctgacggataaagacgaccgttgcaacgcaaatcccgaaaaaacaccgatcatgaaacctgtaacatcagactataaagcatcgaccattgcttacaaaatgccttatgccgattttccgaaagactgctggattacattccgcattcatattgactggacagtctatggcaaagaggcggaaacgattgtaaaaccgggtatgctcgatgtgcagatggactatcaggaaaaggggaaaaaggttagtaaacacattgtagacaatgaaaaaatcatgattggacgtaacgacgatgatggttattacttcaagttcggtatttaccgtgtaggtaatagcactaagccggtatgttacaatttggcaaactattcagaaaggtaattagtcagaaggtaaaaagagagtgatatccggatgttctttttgtgagcatccggatatttttttagttcttttaccgtttatttgtcagcgcagcaatgatagtgataccatttttactgtcataatttgctgattgtaataaagttaaaaatgataaaaaataggactgcatctagtaagtacgtgtcaggtatgcaaaaagatttgtttttttgccgcttgccaaatggcatatataaaataactagtgatgcaaatgatgaacaaaaatgggtttagccgatgtgcagagttctacatcggtcgtttgcgaaaggaaggaaggcattctacagcgcatgtctataagaatgctatcttctcttttagcaaattttgtggcacgtccaatgtgtcgttcagacaggtcacccgcgagcgtttacgacgttacgggcagtatctttatgagtgtggcttgaagcctaatacgatttctacgtatatgcgtatgcttcgttgtatttataatcgaggagtggaagcaggtagtgcaccttacgtaccccgattgtttcatgatgtttatacgggagtggatgttcgccaaaagaaagctttgcctatcggtgaattacgtagacttctgtatgaggatcccaaatcggagcgtttgcgtcgaacacaggctattgctgccctgatgtttcaattctgtggaatgtcattcgcggatttagctcatctggagaaatcagctttagatcagaatgtgttacggtataaccgtatcaagactaaaactccgatgagtgtggaaatacttgatactgcaaaggaaatgatcaaccggcttcgtagtaaccaggattctcatccggattctccagattatctgtttgatattcttagcagtgataagaaacggacggatgaaagggcttatcgggaataccagtctgccctccgtcgattcaacaaccgtttaaaggacttagcgagagctttacgtttgaagtctcctgttacttcttacacacttcgccattcttgggcaacgacagcgaagtatcggggagtatcgattgaaatgattagtgaatcattgggacacaaatctataaaaaccacacaaatctatttgaaaggcttcggacttaaagaacgtacggaggtaaataaagggaatttatcttacgtgagaaactgttgtgtagacagatggtagatatataaaatattgataatcagaagtaaaatatgtgtgttacttcttaggtaacagaacttaaatttgacgcaaagatagacaaaaacacgaatagtatgcaaatattcttccactttttttcgttttatctgaaacatagagcaaaaaactatctgaacatgaaataatcttatttccatgctctatactttttcattgcctaattcaatagttttcttattgaatattaggcttttccattttctacgcctttgtcatgtatgtgatttctattttcactgtagtatgcgtttcgtgtatgtattgtctgttacctaagaagtaacggatgaacatggggtaaaaaaatatgattttaacgaaaccgaaatcagtaaatgccgggcctagtagtgggacaggggaaggcgtagcacactcaaaacgctggtatgtagcactcgttcgaatgcatcacgagaagaaagttgccgagcgtttatctaagatgggaattgattcttttgttcctgttcagcaggaaattcatcaatggagtgaccgtcgtaagatggttgaatctgttcttcttccaatgatggtatttgttcatgctgatccatctgaacgtaaagaagttctaagcttttctacagtgagccgttatatggtgatgcgtggagaaagtactccagcagtgattcctgatgaacagatggctcgtttccgttttatgcttgattattcagaagaagctatttgtatgaatagttctccattggcacgtggtgaaaaagttcgtgtcgtgaaaggacctttgactggactggttggtgaattggtcagtgttgatggtaaaagtaaaatagcagttcggttaaatatgcttggctgtgcctgtgtagatatgcctattggttatgttgaatctgcagacattcatgtgggctaatttttctaatttgaattgatcgatgaaaatacaaacgctttttcggactcttcttctatttttgatactgggagttttttctcccttaatggctcaaaatatgagcgactctcaagttcttgaatatgtaaaggacggcatccgtcaaggtaaagaacagaaacaactagcctctgaactggcacgtagaggtgtgaccaaagaacaggcaactcgtgtgaagcaactatatgaacaacaaaacaatgttaatgcttccaatgcaacgggtaccgatgtcaatgaatcacgtcttcgtgaggaaatgaaagaaaacacttccgatatgctggaagaccacccgagcactcaagacctcgcacgtggcaatcaggttttcggacgaaatatcttcaacacccgtaacctgacttttgaacccagcgtcaacatcgccactcccttgaactatcgtctgggtcccggtgatgaagtgattatcgatatctggggagccagccagaacactatccgccaacagatttctcctgacggcacgatcaatattcagaaaataggtcctgtcaacctgaacggactaactattgctgaagccaatgattatctcaaaaagacattaaacaagatatataatggtcttaataatgcgaatgatcccacctctgacatccgtctgactttgggcagcatacgtactatccagatcaatgtaatgggtgaggttgtccaaccgggcacttactccctctcttcttttgccacagtctttcatgcactttaccgtgcgggtggagtcagtgacataggaagccttcgcaatgtacagttggtacgtaacggcaaaaatatcgccacaatcgatgtctaccaatttatcatgaaaggaaacattcaggatgacattcgtcttcaggaaggggatgtagtaatagtccccgcctatgatgtattggttaagatcgacggaaaagtgaaacgccccatgcgtttcgaaatgaaaaagaatgagagtctatccactcttatcagctatgccggtggctttgaagccgacgcctacactcgttccttgcgtgtcgtacgccagaatggacaggaatatgaagtaaacacagtcaaagaccttgactatagtgtctataaaatgcgaaacggtgatgttgtgaccgccgaagccatccttaaccgcttcatcaacaaacttgaaatccgtggagccgtttatcgtcccggcatctaccagttgaatggaaaactgaatactgtccgtgaactggtaaacgaagcccaaggcctgaccggtgatgctttcttgaaccgtgccgttctctaccgccagcgtgaggacttgactaccgaagttgttccagtagacattaaagctatcatggacggtacttcccaaaacatcatcctgatgaaaaacgatatcctttatattcctagtattcatgacctggaagacaggggcaacgtcgtaatccacggtgaagtagccaaacctgattcttatccttatgcggataacatgacccttgaagacttgattattcaggcgggtggcttgcgtgaagccgcttctgtagtccgtgtagatgtatcccgtagaattaagaatcctcgtagtacagtagataacgatactatcggccagatatatacattctccctaaaagaaggttttattgtagatggaactcccggctttgtccttcaaccttatgatgaagtttatgtacgtcgtagtccgggttatcaggctcaacagaatgtggttgttgaaggtgaaatactgttcggaggctcttatgcaatgaccagtcgtgaagaacgtctttcggacttgatcaataaagctggaggtgcaacgaattatgcctacttacgtggtgccaaattgactcgtgtggccaatgcaagtgaaaagaaacgcatgagtgatgtgatccgtttgatgagcagacagttgggtgaggctatgatggactctttaggtgttcgtgtggaagatacctttagtgttggtattgacttggaaaaggcattggctaatcctggaagtacagcagatattgtcttgcgtgaaggtgatgtgatttctattccgaaaaacaataatacggttacaattaatggtgccgtaatggttccgaatacagtttcatatatagagggtgagaatatagattattatctgaatcaagccggtggttattctgaaaatgcaaagaagagtaagaaatttatagtttatatgaacggccaggtaactaaagtgaaaggtagtggcaagaaacagattgagcctgggtgtgagataattgtgcctagtaaagctaagaagaaaactaatatgggtaatattctaggttatgctactaccttcagtactttgggaatgatggttgcttctattgctaacttaataaagaaataacgaatacctcttatggctactctgatagaacaagaatctgaaaaggaaacaaaacggaagcaagcgactcctgacaatgaagagattgaaatcgacttgatggactttcttcgtaagattatagctatccgtaagaaaatctataaagctgccggcattggtctgctaattggtattatcgttacaatcagcattcccaaacagtatacggttgaagtaactctttctccggaaatgggtaataataaaggtggtggcttatctggtttggctgcttcttttttgggaagcgggatgactgtgggtgatggcactgatgccttgaatgcttctttatctgctgacattgtatcttctactcctttcttattggaactttctaccatggaaatatcggtagcaaaaaatgaagttatgacattgaatacttatttagatgaagagtcttctccctgttggagttatgtaataggatttccgggtatggtaattggtgaggtaaagcttttgtttgccgaaaaggatgagtccatatcttctggtaaaacaaatcagggcgcaattgaactttcaaagaaggaatcgaagaaaatagaaactttgaagaaaatgataactgctactgtggataagaaaacctcgatgacttccgttactgcaacttttcaaaatcctaaggtagctgcaatcatagccgattctgtagtgaagaaattacaggaatatattatagactatcgtactttcaaggcaaaagaggattgcctttatttggagaagcttttcaaggaacgccggcaggaatattatgccgctcagaagaaatatgccgattatctggattctcatgataatataattttgcagagtgtccgtgccgaacaggaacgtttgcagaatgatatgaatcttgcttatcaggtatacagccaagtggcgagtcagcttcaggttgccagagccaaagttcaggaagaaaaacctgtatttgcagtggtggaaccagctgtggtaccattggaaccttcggggaccagtagaaaaatatatgttctggcatttgtcttcttgtctgtttgtattgttatattctggaacttattcggaaaagatttcctgaataagtttaaagaaatccgtgcttaatatatacaattagtgaagtgttatggcgtcagctaaccagataaataaagttgtggagtttattgcagtattgggagatctgatcattttgaacttgtgcctgtttggcctccttctcttctggaaaagtgcgtttatgtatttgcctttttcctgtactgcttctttgatgatgacttcgcttagtctctgttacatagcctgttcggcatctcgtggaagagcctggaatagcagagaaattcgtgccgaccagcttgtgttacgtgttttgaagaatatcataaccttttcggtcttttgggtttgtatcatggcttttagtggaatatccataatctctccactctttttttttgtttattttttcatactctttgttattctaagcatctatcgtatcataattcgtcatttgctgattagttattgtgcgaagggtaaacacaaacgctatgctgtttttataggcggaggtaataatatgcagatgttatatgaggaaatggagagttctttgcatctatttatgaagtcgtaggttattttgatattaaacctaatgatgttttttcctcccaatgttcttattgtggtagtcctgatggtttctctgaatttatgtccggacacacaggaatcaagcatgttttttgttctttgtcaatggaggagggacgctataatttttctataatgaattattgtgagaaccatttgctttattttcatggcgttcctaatatatgtaaggggtttcctagacgtatttggcatagcgtagtgggtaatatgccaattttgaatttgcggtatgaaccgcttagcaaaatggagaatcgtttattaaaacggattttcgatatagtattatcagggctttttttagttactattttcccgtttatttatcttattgtgggaattatcataaagttgacttctcccggtcctatattctttacacaaatgcgaaccggtttgaatggcagggaattcaaatgctataaatttcgttccatgctggtgaatgaagaggcggattgcaagcaggcaacagcagatgatcctcgaaagacccgatttggagattttcttcgccgttctaatattgatgagcttccacaatttattaatgtattcaaaggtgaaatgtcgttagtaggtcctcgtccccacatgttggctcatacagaggtctacacacaattgattgataagtatatggtacgccattttattaaacccgggataacgggttgggcacaaacgaacggattccgtggtgaaactaaagaactgtcacaaatggaaggtcgtgtgaaggctgacatatggtatatggagcattggacaatattacttgatttatatatcatttataagactatagctaatgtacttgtaggagaaaaaaatgcatattgagtacatcgtttattgttagatatagtctgtttactgtttttttgaatgagtgttttaaatatctagatataaaaaataaaaaaatgtataaggatgaaggcagtcatattagcaggtggtttcggtactcgtttgagtgaagctaccaatcttattcctaaacctatggttgagataggaggaaagccaattctttggcatataatgaaaacatatagtcattacggtatcaatgagtttataatatgttgtggatataaacaatatgtgattaaagaatactttgctaattattttcgacacaacagtgatatgactgttgatttatcgaataatacaactactattcttgacaatcattcggagaattggaaagtaacgatggtggatactggtctgaatacccaaacaggtgggcgtatcaaacgtattcagaaatatgtaggcaatgaacgtttcctgctgacttatggtgatggagtcgctgatctgaatatcaccaatacgattgattcgcattgtcagtccggttgtatattgtcgctgactgcttataaaccaggtggtaagtttggtgctctccagatcgatttggatacgaataaagttctttcttttcaggagaagcctgatggtgatcgcaactggatcaatgccggttatttcatttgtgaaccggaggtattcgattatattcccgacaatgatgataccgtcatatttgaacgctctcctttagagagtattgcacaggcaggcaaaatgcatgcatttcgccatattggtttttggaagcctatggatacactacgcgataatgtagaattaaatgaaatgtggaataatggagaagctccatggaaagtttggtaacaaagaacaaaaagaataatttttaatattaatatttttatgtctaaacaagaagaactaaagaagcagattttagagttaactgcacaatattatgcagaagtgcatgatccggcaaagaaagagtttgtccccggtgaaagtttcgttcattatggaggacgtgtttttgatgaacaagaaatgaaaaatttgatagattcatcattagatttttggttgactacaggaccttggacactagagtttgaaaatcgttttgctaaatggattggttcaaaatattgttcattgacaaactctggttcatcagccaatttattggcattctttgctttaacatctcccttgttaggtgaccgtcgtataaaacgaggtgatgaagtcattacagttgcgtgtgcttttcctactactgtcacgccgattatgcaatatggtgccattcctgtatttgtagatattactatacctgaatataatatagattgttcgcagttggaacaggctctttcgtctaagacaaaggctgtgatggtagcccattcgttgggtaatcctttcaatttgcaagtagtatcggaattttgtaaaaaatataatctttggttaattgaggacaactgcgatgcgttgggtacagagattgagatagatggcattgtcaggaagtccgggacagtgggagatattggaactagttctttctttcctgctcatcaaatgacaatgggtgaaggaggcgccgtttatacagataatcctttattgaataagataattcgttcgtttcgaaattggggacgtgattgttggtgtataggtggtgttgacaatacctgtaataaccgttttaccaaacaatatggcgagcttcctttaggctatgatcataaatatgtttatagccatctgggatttaatctaaaagtaactgatatgcaggcggcaataggctgtgctcaactggataagattgatggttttgtagagtctcgccgaaaaaattttaaaaagttgtatgacggtttattgggaacaaagggtattattcttcctgaagcagagagaaactctaatcccagttggttcggttttccttttacagtcagtgaagatgcaggttttactagaaatgaattaacacaatatctggaaaacaaaaaaatacagactcgtacgttatttgccggcaatataatcaagcatcctgcttttgatgaaatgagagaaactggggaggggtacagaattgtcggtgagcttcctgttacggattatgtgatgaacaatactttgtggatcggtgtatttcccggtatgacagatagtatgcttgactatatgattgcaacaataaaagaattttgtaatcggtaactgatatggtgacaaatacattggcaaaagactttgaacatacatttgccggactaacaatagaagaaaggggaaaactaaaaggtgccactattcttgttacagggtgtggaggttttctcggatattattttatgcgattctttcaatctaaggccgacgacttggaattaaaaaaggtgatagggcttgataattttatgctcggctatccacaatggatagaagaactttcaaaggattctctgtttgatatacaaaagttcgatattattaaagataagattgaaaaagtaaacggcgctgcagaggcggattatattattcatatggcttctattgcttcacctgtcttttatcgtcagtatccgatagaaacattagatgctaatatttggggacttcgttctctccttgatttctacaaagaaagaacaattaaaggtttcttgttttattcttcgagtgaattgtatggaaatccggattcggaacatgtacctacttctgaagaatattatggttatgtatgtgccacaggaccgcgtgcatgttatgatgaatccaaacgttttggtgaaacgatgtgtatgctgtttgctcagaaatataatatgccgattggggtggcaagacctttcaataactatggtcccgggatgcgcatcaatgataagcgtgtgcctgcagattttgcgttggcaatcaaagaaaataggaatatagagattttatccaatgggtctccgacacgtacgttctgctatattgctgattctataaacggttacctgaaaatactgctttatggaaaatatgactattttaatattggcattgaaaaaccggaaattagtatttctcagctggcagagatttatgtaagtgccggtaaagatatttttggttacacaggtaaagtggtttatgccatttcggatgatagtgagtatttaacgaacaaccctcaaaggcgttgcccgaaaatagagaaagctcaaagaattctgggttataatccgtctatttctgttgaagagggcgtgaaaaggtttttaaaatttataaaagaaagtgaggagggcgaatataaatggtaattacagttttcggattaggatttgtcgggcttactacagcattgggcttttccgagtatggacatacggtttatggtgttgagattgatatgaggagattatctgttattcaatccggcaaacttcctttcctggaaccgggattagacaccgctttggaacgtcatttaaatcataacttccatcctgtctctacggattcattaaaggaagccatactgcagagtgattgtgtttattattgtgtcggtactccttatgggaaggatggtcaggctgatttgacatatttattggaagcgatagaccagacattaaatgttgttgacgatacccgttttcgtgtattagtcactaagtccactatacctccttctacttctataggtaagattattccttttttggaagaaaaaggaataacagttggagataattacggggtggctaataacccggaattcttgcgcgaaggtcattgttggactgactttatgaatgccgaccgtattgtattgggagtaagtgatgataaatcggaaaatatacttcgtaatatctatgatgggcaaactgttcctgtttattgtgtatcattgaatacaggtgaattcatcaaatatctgtctaataccttgctggcaacattgattagttattcaaatgaaatgtctgttatagctgatgcgattggtgatattgatattgctacggcattccgtattcttcatttagacaaacgttggggaggatgctctatgtcttcctatgcctatcctggatgtggttatggtggttattgtttgcctaaagatacaaatgcactttatgcagtggctaagactgccggctttgacgcgaaaatattgaagaacgtgattattacaaatgacaggatgccggaatttataacaaaccggataatgaaggtcattggtgataaaaaaaatatcagaattgcaattttaggtttatcgtttaaaccggaatctgatgatgttcgggacactccgagtgcaaagattatagcgcagttgcttaaagagggctatcataatatatatgcttatgatcctgtagctaatgaggaattttcttctcattatgatttggatattatctattattcagaatacgaaaagatagtgaccgcttcggatgtatttgtaatagcgactgcatgggatgaatttagagatattcggatacgtactgaaaagccgataatagattgtcgttttatgttataatagttttatgaatatattggtaacaggtgcaacgggatttattggaaaacatttaatttcctatctgtcaaaaagacataatttgtacattttagtacgttcaggttcaaattgtacatttcttaatgtaaataatgtttttgtgttttcagaaaatattgatgaattggctgcttatttgcgtaaggaaaaaattgatggtattatccatctagcttctttttatatagccgaacataagagtgaacagattaaagatttagttctttccaatatctatttaggaacagctttgttggaagcatgtaagaaagcggagactaagtggtttttaaatacaggaacaatttggcaaaattataatgtttctgataaatcggatgaatataatcctgtagacttgtatgcggcaagcaaacaagcttttataacaatggccaagtattatacagaaacgagtaaactccgcttctgtacattgaaattgtgtgatacttatggtccgggagatactcgtaaaaaggttttagccttatttgaccgtatcgcttttaccggtgaaactttagctatgtctcctggtggtcagaaattggatttgcttcatattgatgatgtcgtaaatggatttgaacagttggctaatatgctgaacgatgagacagtttctgttttatctgaatatgttctttcttctggtaaacaaatatcattgcgagaattagctgatatttatgaaaacttatatgatgtgaggttgaatataaattggggtgggagagcttatcgaaaaagagaagttatgcgtccttatcagggaaatattttgcccggttggaaagctttggtattgttaaataatattaacggggggggtagatgatactctctatattccatttgcacctatgcgtaattataaaaaggttgcgtgatgaatattttaatatcaggtgcgacaggatttgttggccgtcatttagttccagtattgcagcagggaggtaataaattgatttgcatagttcgagataaaaagaaagctgtagaattatttggtgatgttgatatatcttatgttcatatagagcatttggatgaaatagaaaaatacgctccggaatgtgttatccatttagctgcatacctttccagtaaggatgatcttggtactttagaaagattgctagatgccaatatacggtttggtactttgttgcttgatagcttgaaacggtgcaagagtttaaagttatttgtgaattttggaacttttgcagagtacagatatgggccgatggaaataaacaatgcctatctttattcggcaactaagactgcatttaaacaactcttgaaatattattcagatttgaatcattataaatatataaatatcataccttatactatttatggtgaaaaagactctcaaaagaaactgatagattatgtgaaagattctttagagagtcaagagccgataaaaatgtcaccaggtgagcaagtcttagattttatacatatagatgatgttatatctttcatcaattatgtaatatgtcatctgccattgattatacaacaaccttttgctgattatcatttaggtaccggtaaaggactgtcaattcgtgggttggcaaagatgatggaaaagaagtataaaaagaaatgtaatatagcatggggagcattaccttatcgggtaaatgatgtaatgtacgcggtagcacctattggcagattaatagatgtaggttggcagcctgtgtgcgaattagagaaagaattgtagtgaaagagcagattgttatatctagaaaagatattatttgggggtatgttacattgttttttcagatggcttctggattaataacattgcctttgatattgaagatgttgtcggcggaggaaattggcatgaactatttgatgcttacagtagggtctttggtttctttattcgattttggttttgcacctcagtttggccgaaatattacttatgtttttgcaggtgctcaagcactaaagaaagaaggggtggacattggtggaggtagtgtgaattatcggttattgtccactatgatttcggtggcaaaatccgtctattgtattttagctgtagtcgttttattgattatgcttactttgggcacagcttatatttataaagtgacacatggctttaaagatgtgcataattctctcctaatatggatagtctattctatatctgttttttttaaagtgtattacacctattatagttcattgttgataggtaaaggattgataatggaatctaaaaaagcaattttagcttcaaatttactatatattattttggcttttgtaactttgataatgggatttggattgttaggtatttccatagctaatttaatagctccgtttattggccgttatctttcgtataaattcttttttacacctcgtttttgttatgaattatctcaatatcatgtagcagcaaatgaaaagtgggcgttatttaaaattatttggtataatgctcaaaagctcgggttggtctttattggttcttatgcaataaataaatgtagtatgtttcttgctggattatatttgtcattagaagagatagcttcttatggtcttatgatacagttaatgactgttgtgacaatagtttctacaacatttttcactgtatctgaacccgaatttgctgcattaagggttgataataaaagagaggcactgatacagaaatttgcatttactatgaatatatattatattttatttttgattggatgtatatgtttcgttctattggctccttttattttgaatttaatagactcaaatacgacgcttccaccgttttatattttattgctttattcaatagtgactttactagaaaataatcattcttgttttgcaacatttattatatctgtatttataaccatagaacaaccaaaactaatcagaaatatccgagtgtaaatctttaattaccagcatattctaaaatttaacacttttcggttgccatttgtcgcttcccaaatttccacatatttttgagacgtatttctgacgtggagaatttgcggggcttgttttttgtcacaccgtgcagacagttgacaagggtttacaaccgtttacgacaagcgacaataaccgccccgatatgcggaaacagtcacactgtgtagaaaagcgacaatggttgacttccgttcacatccgtttaccatttcagagatataggattgaagaaatgaaccattaaacgataaaacggtatgaaagcaaccagaaaatgcagtttttgcggcaagtcctttgtaacccgaagcggtatgcaaagatattgcagtgaggcttgtcaggcagaagccaaacgagccagagtgatgcagaagaacaacctcttcaaagtcgcccaacccttgatggagatacagcatcaggagtatctcaccttttccaaagcagccatcctcatgggctgttcccgacagtacatttacaaacttgtagccatcggcaagctgaaagcctcacgcatcagcaaccgcatggcattcatccgcagagccgacatcgagcagatgttggagggcaatccctatcaccgcatcctgcccggcaacacctccacaccaaggaaatcatcttcatcttccttacctgccaaaagagaaaaaagggaaaaggaaagcgaagaagtgttggacttctattcgggcgaggaggtgatgtccctttttaaggtaaagcagtcatggctttacacttccgccaagcgtaaccatatccccatctgccgtatcgcaggaaagaactattacagcaagaagcatattgacgagtttttcggtgtggcagttgatattagcgaaattaccgactggctactgaccgaggaggtggaggaactgttcggcatgaagccgaccgcactccgtgcctacacctatcgccataagatacccactaaaagagagtacgggcgtacctattactccaaatcacatttgaacgaactccgcagaactgaccttgtgaacgatgaacgctactataccgttgagcaggtgcagcaaatctatggtctttcgtcagccaacatctgccatatcgtcaaggtgaagcacatcgaaaagataaaggtgggtgtgaaaaacctgcttttgcgctcagatgtggagcgtgtcatggctgaaaggaacaaataaccgtgaaaaatcgggattatcgaaaattatttcaaaatgatgtatcgtggaggtattcacggatatttcacgttgttcctttgccatcggaaacatggatacaactccaaaatgtatacaaccaattaaaacataattattatgagtaaatgcaaaacagttaccttgcgtaagcgcaagattaagaacgggacacagtattcactatgccttgactactatcccggctaccgtgacaatgtcaccatgagagtgattacacgtgaagccttaggaatttacatcttcgccaaacctgcaaaccagcaggaacgggacttcaacgcacgcatgatgaagaaagcggtcatcctgcgcaaccagcgctacgaagccattttcaatgaaaacaacggcttttttgacaagaccaagatgaagggcgatttccttgcctatttcaaaggactggctgaccgcaagaatatcaagtggcagcacgtatacaagcatttccagcggttcgtgaacggcaaatgcacctttgaggaggtggatgtggatttgtgccgcaagttcatggaatacctgcttgatgcaccccaatccatccacaccaaccaaaagctgcacatcaactccgcagcaggctattggtcaactttccgtgccgtgctgcacaccgcttaccgtgacaggaagataaaggagaacccaaacggcttcttagaccgcatcgagtgcattcccaccatcagggagcatttgagccaagaggaactgatacggcttgccgaaacaccctgtgaggaggaggtcttgaaaaaagcttttcttttcgcctgtcttacgggactgagaaagagcgacatcagacagctcacgtggcagcagatacaaccatacaccaacggcaggatgttcgttaccacccgtatgcagaaaaccaaagaaatagtgcataaccccatcagtgatgaagcctatggactgctgggagaacggggcgagggacttatctttgaggatttcaaggacaagatgctgcaaggaccactccaacggtggctcacggcagcagggataaccaagaaaatcacctttcactgtacccgccacagcttcggaagcctgcacgtggaaatgggaacggacatggctgtcatccaagcctatctcggacataagaacattaccaccacacaaatctattccaagatagcagcgcagcagatgtgtcaggtggtggacaagataaccttgaaacgcaaggaggcataaatgtctcacattgacaggtattcagaggggcggttatggctacaaggctataatcgcccctctatgtttttggcttgatgccaccatttataagcccctcagagtatgaaacagagtatgatatgatgacatttcgtgaaatacattgaaaaagaccgttctaaccgcaaataacgggcagtaattgggaaaaatagcattaactttgcacaaaataatacaggaacattcaatctctcaacgaaatatggaatcatcaatcaaggacaaatacatcatcttgggctttgtcggcttcgccatcgtcctaatatcttccattgccacgctggtaatagcggacagcttcaaccaagacaactttgtcaggtggatagtattcgtatgctgtaacctgttgggatggttgctctatctctcctttcagacacttatctttgatacatacgaaatctacaaaatcaagttcggcaagaaagaaacgattgccgaagccatagaggtgcaggaagaactgtcacaaaatacacttgaagaagccacatctgtgcctggacctacatcagtccctgagcctgtacccgaatcatccccgacaaaagaagagacacttatccaaacacaaccgatagagcttactatcgccccggatcttcacgaaaagaaccgtgccaattacgcaagcagagagcaacgggaaaaggaagagcgcatccgcatggtcatggagtattgccattattacctgcctcgcattgccgaccaagaaaccgtgaaccacatctgtactgaggtggacaaatggatgaatcttaacacttataccccgaagcccatacaaagaccgtttaccaaagacatcaacaacattccactccgtcacttcgtatggaatatctctgagcgtttcctgtacaagagatactacaatggggataaccgtgccaagttcatcaaagcccttttcccgaaatcgtttgctgatacagacttatcaaccatcaagaatttcaaggtagagccgttaaagacggaaattcccattgatgaacccgaaaacggcaaacttgatttccactatcccgaggattatgtgcggaattaggataatcacgacaccaacgacaaccatccggtaactcataaccgcctgttttacatcgtttcccgagtaattttacccgtcatttatggctgggcttaattattcgggaattattttgcaatgacgtgtcgtggagatattcacggatatatcatttcagtcctttgcgccaagtcttacaaaagagacgagtacgcgaatggaaaaatcaattcttaccttcaacgacctccccgaggttgtcgctcagcttcgagacgaagtgatgagcctgaaaagcctgctcgccgagcagcgcagtgtgaacaatgccaaaacggtggacacccacgtgcccatgtctgtggacgaggcagcagagtatttaggtatccctaagggtacgctctacatgaaactgtcagaagggacaatccctgccaccaagcccggcaaacgctattgcctttaccgtgacgaactggacaagtggctggaaaccgcccgaaagaatcccataccgttgtcagacgaggaactgaacaagtccttatcctcttcccaccgtcgcaagcccaacccacgtaactggtgaatgatatggaagaggataagaactatatcaacctgatacgtggcgacctcacaaaagcatcccaagcgcataacggtatgcccgacagtgtaggcatgatgaatatcaagacggcaaaccaaaccattcttgaagcatcgttattgcctacgccccgtgcgctgtgggacagcttttggtacgagggggaactctcctgcttgtttgccgattccaacgtgggcaagtccatccttgccgtgcagatagccgaccgcatcgcccgaaccgacaatgtgctgtatctggactttgaactgtccgaaaagcagttccagctccgctataccaacgagcatggagagctctacacctttcccgacaaactctatcgggtgtctattgactgcaaccagcttttggatgccaactttgaggaagctatcataggcggcattgaacagatggctgtgcagaccgactgcaagattttcatcattgacaatcttacctacctgtgttgcgccatggagaaaggcgatgccgcaggacggctgatgattcagctgaacaatctcaaaaagagatatgcgctctctatccttgtcctagcacatacgcccaaacgctctttggattgtcccatcacatccaacgaccttgccggaagcaaacggctctacaatttctttgacagcgtgttcaccattggaaaaagtgcccaagacggagggcttcgctatgtgaagcagcttaaagtgcgctatggcacgttctctcatgatgcggataatgtaatcgtttacgagattgacaaggtggatgctttcttgcagttcgtgttcaggggctattccacggaaaaggaacacttgaaaaaattgggcgacaatgaatcaagccaaagggattgccaaattctgcaactctcccaatcgggcaagtccgtcagggagatagcctcacaggtgaattgtggcaagtccaccgtaaaccgtatcatccagcgcagcaaagagagtaaaaacgcaggtgtcccaagtgtcccactgtcccaacccttagagtgtgggacaatgggacaggatgggacagccgacaatcaaccatcaaaaacggactaagctatgggcaattattcattacagaagtataaaggaacggcaacacggcatacctgccccaaatgcggagacaggcattctttcgtctattacgtggacgaaaataatgtgccgttgcatccatcggtcggcagatgtaaccacgaaagcggttgtgggtatcactacactccgaaagagtattttcaagagcatcctgaacacagaactaccaatgatttctcttttgacaggcaaagagcagagcagaagaaagtgaagcagcaaagtaagccgacagccatcggctatattccccctcactatgtggagaagtcgcaaagcgagcgtagcaatttcttccgtttcctcttcacactccttacttcctactatggcgacaaggcgaaagaggtgttgaagcggttgttggaggaataccgtttgggggctacccgtgacggctctgttatcttttggcagatagacaggacgggcaaggtacgcacgggaaaggtgatgcagtacaatcccgaagacggacaccgtatcaagggaggacagacatcggcagtgaactggatacacagcatattgaaaaagcagcgtgtgttggcagaggattggcaactatcccaatgccttttcggggaacacttgttgaaaacgcatcccgacaaggtggtggtcttggtggaatccgagaagagtgccgttatcggttctgctatcttccccgattatgtatggctggctacgggtggtaagagtcagatgagagaagagaaactccgtgtactgtcagggcgaaccgtgcttctctttcccgatgccgatgcttatgccgagtggaaacagcgagccgagagcatgtacttttgtaaggtggtggtttcggacatcatcgaaaggaatgccaccccgaaacaaaaagaagcccatatcgacatagccgattggattatctttcagatacgggagggcaaggtgatgagtacagccaaccacttggtcgaggctgagagaatcctccagcggatgatagagaagaatcccgtcctgcaaaaactgatagacgatttagaccttgtgctggtcggtgcatctccaatcggcaacgatgatgaaaaacctccctgacggaggagagcggaagccgtaggctggagtttgcagacaatggcttgccattgatatagcccactataactacacgctccgcttacgtagttgtgggctctcccgaggggattagggttttaccctaatgacccactcagggcgtttctcccctgagaacccagagcaaagagtgaccctctctttgcaatctccgcttatgggttgcacccctaagaaccccatgcgtttacggacagcggaaaagcaaacaataaagtacaaaccaaaaaacaagtatctatggcaacaaaatcaagcatacatatcaagccctgcaacatcgcatcgagcgaggctcacaacaggaggactgccgaatacatgcgccacatcggagagtccagaatctatgtcgttcctgaactatccaccgataacgaacagtggataaatcccgacttcggcagtccggatttgcggatgcattatgacaatatcagacagatggtaaaggaaaagaccggacgtgccatgcaggaaaaggagcgtgaacgcaaaggcaagaacggtaaaatagtcaagattgcgggatgctcccccatacgtgaaggagtgctgcttgtcaggtcggacaccacactggcagacgtgcgtaaattcggtgaggagtgtcaaagacgctggggaatcacaccgctgcaaatcttcctgcacaaggatgaagggcattggctgaacggtcagccggaagcggaagacagggaaagcttcaaagtcggggacagatggttcaagccgaactatcatgcccatatcgttttcgactggatgaaccacgaaacaggaaagagccgaaagctcaatgacgatgacatgatgcagatgcagacccttgcatccgacatcctgctgatggaacgcgggcagtcaaaggctgtcactggtaaggagcatctggaacggaacgactttatcattgagaagcagaaagctgaactgcaacgcatggatgcagccaaacggcacaaagaagaacagataaatcttgccgagcaggaactgaaacaggtgaaatcagaaatacgcactgacaagttaaagaagacagccaccacggcagcgacagccataactagtggagttgcttctcttttcgggagtggaaaactgaaagaactggaacgtgccaacgaaaaactgcaagacgaggtttcaaaacggaacaccaatattgaaaaattgcagagccaagtacagcagatgcagaaacagcatgatacgcaaatccacaatctcagagaaatgcacaggcaggaacttgacatgaaagaaaaagaactgtcacggctcgccagaatcatagacaaggctttcaggtggtttccgatgttcagggaaatgctgcgcatggaaaagttttgtgccatgctgggattctctaaagaaatgactgaaagtcttatagtcaaaaaagaagccctgaaatgtagcggtaaaatctattccgagcaacacaggcggaactttgatataaaggatgatattttaagggtggaaaatgaccctgacgatgaaagcaggctgaacctgacaataaacaggaagccgattgccgactggttcagggagcaatggcacaggcttagatatggagcaagagtgccgcaacaggaagaaagaaaaagtagaggattcaaattataatagaagcaatttgattagtaatctaaaagcactccgataacgattagagtgcttttagattgtttatcattaattatcaaagcaagtgcagtttaagattttactgaagtttgcattaataaagaatatactacagctgatatatgcgcaacatattgtgacgcttgtgattcatttcccttgaaatccttaacaaataccgctaaggtataactgatattattaggcagacatatataggcaacatcattgtgagctgcaagaacaccattttcattaacattacctgaacctgtcttatgcgctataacaaccccttctttatcaagaagtggagctgctatcctatctacacctgttttgcattcttttaacgtattcttaatgaaactttgtttctcatcatcgataagaccttcagtaaacaaacgattcatcaacattgcagcaccaagaggagatgtatagttagagtaagccttgttatggtcagccgacatttcctcttccgtataagctatctgaaaacttgaacgaggaatgagtgtggctataaaactatctgtttgagcgacattaaccatatccttaaacataaggttgcttgcattgttgtcactctgagtaagagtataacgcagcaaatctctcactgtcaatgatatgactggccctgaataatctttcagcataggactccaagtctttgggtcaagtttatccctatttatatttactaaggtatcaagtgaaattcctttattgtcaaagtcattacaaagagctaatgcctgatgaaccttaaacacactcatcataggataaacactcttattattgaccttaaccgtatctctgttattaacaataaccgccacaccaatttcgccaggacaagctgagacaatttgagaaatgctatcagtcaaaacatttgttaaaggaggatttgcgctatcttttgtcgctgatttatggaacaatgaaaataccaagatgaaaatgcaaactaaagctatactcaaaactacgatttgtttttttctgtttttttccatgtttatattatttatatttgtttgacgagaatatctttatttgccgacaaaggtacataactttacggaaaaatatgtttctaaaatatataaaaatatataaatagacagctgtggggaaaatgtggggaaaaattagataattaaaaaggctaaatgactggaaataatcacttagccttttaatccgtacccagacccgtacttcgtaattgctgcgcccatcattcaagactgtcaaatcgggtctttcctgtcaagccaatgatgcctatgcgtatgccaaacacatggattacggatttctcgttccgtgaacaaacactttatccgcaactctgctatgtggtgtattggcttaactccatttctatgggcaacacttttgttgcagatttcaagcagcttttatcgaaatacccatcagtaagaactcgtttattaggctttcctcataattgggaacaagagcctttgtggagataaaataattgccctgtttcttaaaaagcactggggcaaaccagctccgtctttaattgtttccaataaatggattgtttcaagcccctatagaaagagaacaaaaattcctgtgtgaaaattaatctacgacaaggagcaagcaaggagcaatatcaaacaaaaatcaatacctttgcagtacatatgagatagaccaaaacaaaagtggaatatcggaaacgaatagcaaggaaaagagaagaaacgacccaagttgatgtcctttttgagttaataatcaataaaagcgttaaatcttcaccttttagaatgtgcaattaaaaataacaaccatatttctgacttattatctataaaatattgagtaataatcggttgtaaatactcctatttgaaaataaagttccttttgtagcagcctctttgctggctggaactgctatttgtgttggtagttttttatctttaaaatatactttatggggcgttgggggactagttttagttcaaggaggatgccagttattatatgctaattggaaatggccttatgtggtatgtcatgattttaaactgtctttttttgattttattaaaatgggtattaatcaatctctaaacagactgaaatattatggaaaataaatatgttaattcatttgaatatgtagataattttgcgaaagatgaaggtgtacattctatacccatatttgaagctaatttaagtcaacatcctaaagtaaccattgctattccaacatataaacgtgctgctttattgaaggaagctgttgatagtgcgttgaatcaaataggattcgatgaatatgatgttatagtggtagacaatgatcctgatcgtgatgatgaaacggaaaaattgatgcttaattataacaatccaaagttgagttattataaaaatatgaagaatattggaatgattggaaattggaatagactttatactttagctagaggtgagtgggtagtgatgttgcatgatgacgatctattatataatgactatttgagtattctttttaataaatatattgatgttcattgtaaaatagatgctttttttccaaaagctatttctaatgaaaaaaaacgtgttcaaagaaaaagaataagtagttggtatttaacagtaaatgattttttaagagataacattgtagaggctcccttggggttttgtataaaaaagaaaagcgttattgatttaggaggatttagtactgtttaccatccttcatctgattatgaattttatgtcagaatgcttgcaaataattataaagcacttcgacttgaaggacattctttttgcttttatagaatatctgttaattattctttgaatccagaagtcgttttagaatttttgaggtgtgatgatttgattagacaaaatatactcaataataaatctctaatattatgtaaattgtggcattattataataaatcacatcgtgtacgagctttaaaagatgcttgtctgaaaattactgataatgcaatgttactaaatagattggaaatagccaaaaaagaagaaaaaattagttctaaaattgtttttgttataattgaatcatataaaagacttgaaataaaggtgcgtgcttttaagtacttattatatgattcatgttctttgctttgtagatattgaagatatgggatgtctgtgttgaacgaactcataggaaagtgatcggaaatttgaagttatataaaattgaataataaataatgaaacatcttcttctaacaacagatgactattatccaagaactgggggagtgccagctgtaagtcgatatctttgtgaaggattagcacaaaaaggatataaagtaacagtggtaactattaaatatgattcattacctgctaaagaatcctttaatggtgttgatattgtgagatttgaaatacatactactagactgaaatttatatcaggggaaattacagagtttaaaaattatattcaacaggctaatgtagatatacttataaatgaatgtccggaggcattgacctctcgatgtctatatcctattttagtagatttgaaagatgttattaaaatactgcacgttcatggttttggcggccttttccaatacccactaaagataaatttctcaggtcgtatgttgaaagcttttaaatatcgcttattttattttgtatatttgaggaaatatctgtctctgtatgatttatgcctttgtttatcagaagttgatagtagtaaaacgactttggaaaaatatgctcaaagggtgaaaattttaaggaatgcagtagatgatattttttttgagacttctaatcgtgagaatccgcttttaaaatatgcccagccaactaataaacgttattgtctgagtattgcaaattattttccttataaaaaccaaaaaggaattttactagaattctataaatctgtaaatgatgatatctcaattatatttataggaaaagggtcttcacgatattttgcagaactgatagcttacaatttagaattagaaaagacctatggtaaaaaagatgtgttctttttatcaggagttgctcgagaagatattccagatatattgtcaaatgcaactttatatttagtcggaagtttttttgaggaattctctatatctattattgaagcaatggcaaagggagttccatttgtaagcactaatgttgggaatacaaggttgttgccaggaggtgttgttgttgaatcaatatctcagatgcataaaagtatagatttattattgaataatgcagaactgtataaagaatgctcgtaccgaggtagagcttatgctatgcaaaattgtcgaacggaatatgctgtggatcaattggaaaagtatattcaagatttaatgtaagatgaagaaaattgtagttattggggctggagtctcgggtttatctattgcacgtctattagttgatggtggaaataaagtaactgttattgaaaaagagaataaacctggtggtttgatcaagtgtgataatattaatggatgtttgtatcataaagtggggggacatgtatttaataccaagcggaaagatgtattggaatggtttgagagtatctttgataaagaaaaggatttttcaaaagcagatcggaattctgttgtttctatgccggatcgtagattaattaattatccagtagaaaatcatgcttatcaatttacaccagttttgttagatgaatttattgataatttgcaggagatgattaaaaatggggatacaaaaggtgaacctaccaattttgaagaattcttatattttcgttttggagtaatgctttatagagagtattttcaaccctataatgagaaaatatggaaaagagacttaacaacggttcctttgtcttggttggaaggtaaactccccatgccaactttaaaagaaatattatataataattttattcatttagaagagaagaattttgtccatagtacttttttctatcctcgatatggcggatcccaattttttgctaataagttggcagaagaattggatatacgatataatacacaagtggttagtctggaaaaaggaaatggatgttggttggttaataatgattgttttgatcaggtcatattttgtggtaatataaaagatttacctgtacttcttaataatgtagtggatatttcaagttttgaatctatgattgagaagttggaatatcatgggacaacatcagttttctgtgaaatagagaaaaatccatatagctggatttatttaccatcaagagagtatcaggcacatcgtattatatgtacaggtaacttttcagaagcaaataatatacctggggtattgacaggtgttgtagaatttacagatcatatttctaaagaagatattttaaaaaatctagaaaaaattcctttttctccacggtatcttactcatacttatacaaaatatacttatcctattcaagatgctttaacaagagagatgatactaaacttgaagaatgttttagagaagcaaggactttatttgttaggacggtttgctgaatgggagtattataatatggatgctgcaatgggggcggcaatagatatgtttaattcaaaattgaaataatatgatagttgtatattcaaatgcgggattggcaaatagaatgtttcattatgctttatataaagcaatagaagcaaaaggcattgatgtttattttgatgaaaagtcatatttgccagaatggaactttgagcagacaacattgattgatgtttttcctagagttagatatagagaatgccaatattttaaaagagtagcgaagaaagatgtattttctaggataataagaaaactctcatggaaatattatataaattatagctttaagtatgatattaatttgtgggataaattggaaggtgataagtgcctaatgggaatatggcaatctgaaaaatattttcatgacattaaaaatgatattcgtgaagatttttgttttttacaatttgaacaagaaaggaatagagaagcagaatgcataatgaattcgcaaaattcagttgctatccatataaggaaaggtgtcgattatttaagaaacccaattttttcgggaatttgtcctatagaatattatcatgaagctataaaatatgttagggaacatgttgataaccctattttttatgtttttacagataataaggaatgggtcttgaataatttgacggatttaaattatactctttgtgactggaatccgacttctggtaagatgaattatttagatatgcaattaatgtcatgtgctaaacataatataatttccaatagttcgtatagttggtgggcagcatggcttaacaaaaatcctgataaaatagttgttgctcctcaaaaatggtcgaatagagggggggggagtgatattattcctgatagttggatacaattatagcatgatatgactattctatttataaataccttatatagccctcatataggtggaggagctgaagttatatgtcaagagcaagtggaaggatttcagcgtagaggttatactgtttctgtcttaactactagccctaatttgggcttatgccaagaagatgtgaatggtataacagtttatagagctggaattaaaaacttttattggcattttagcaattcaaagccaaataaatatgttagaatgctttggcatattagagatatttacaatgttgggatgcgaaagtatgtgagagaagttatgcaaaaagaaaaacctgatgtcgtaatatgtcacaatttagcgggtttttcaatttcggtatgggatgtgattaaagagaggaaagttcctattattcaggtattacatgacttatatttactttgtccaggtagcaatatgtttaaatatgagagagcgtgtgaaaaacaatgtagaatttgtagtttgatgcgtttttgtcataagggaaagtctaaggatataaatgttgtggtaggcgtaagtaattatgtattggaacgtttaaagagaagcggatattttagtaatgcaaaagcacgcgtaatttacaatgcacgcaatatgccagagtctaatgaacataggagtaggaatattgaattcccttttcgaattggatatattggaactttatcgaaggttaaaggagtagaatggttgattcgaacatttatgcgattggatattaatgcaactttatttattgccgggcgtggagagtcaattgagtatgaagaatatttaaagaagattacttctgttgataaaagaatatcttttttaggttatataaagcctgcggattttttttcacaaatacacttgtctattgtgccatctatatggcccgatacatttccgactgttgctatcgaatcatgtgcctatagtgttccagtgattgcaacaagagtaggtggattgcctgaaataatacatgatgggataaatgggcttttaattgaacctttggatgatattagtttatcggatgctattatgaacctttatgaagataagacattgttacattctttatcagagaattcaagagaaataattttgcctttgttagattcagacagaatgatagatgaacttatagaagttataaatgaagtttcttcttcgaaaaaatgtttgctaagcaattgatcgtacttgataattatgtgtatttaataaatgttgactactgtaacaaatttgtatagtgcgaaataaatcattttattatttgacttctgctttgataatactagctattcaatttactgatttgaaaattggccccgtgaaattatcagagattatatttttgttatatgctcttttatgcctaaaaaaaatacataaagtaacttattcttattttattttgtttacattttttttacttgcgacttttgttaagaatccatttatgagttttgacaatagtgttgctccttcttttctgaaaacatcgtattggatatctattagtcgttatcttgaattaatagcttgtttaggatttacagagtatatttgtaatatatcaaaaaaaataggtgtagaaggattagtgcgattgattttaaattcaactaattacttttcttttttacttatattttaatatttattgaattatttaggtactgattggatatctgtttcgcatgaaggatccttttttcttagacttaaaggattttatgtagaaggggggccgttagggttaatgtattccatgttaatagtcctaaatattttattcgtgggtaagaaaaaatatacattaatctttttagtcattttaattctatctcaatcgaaagctggtgtatcttgtttatgtgcttatctcgcaatttattggatttcttcttttcgccaaagtcgatattattcacgatttaaatatattcttcttcctatttcggtggtgtttttcttgatagttttcgtgtttatttcaaatatatacattcaaagaattgttgatacgcaaatgttgcaagtatatgtgaataataatccggaagattattctgttacagctggacgtatatctgctacatttatattacatgaaatgtttattaagaatccgataataggtattggtatgggtaactatccccttctgcggaatttggatgaatacagatctttttttcctgttatatctatttttgatgcttctggttatggaggaataatagatgtaataaatcaatttggtttattaggattgatcttgtggggaatgattctgaaaaaaatctaccatttgacttctaattggaaaatagtatttttatctcagtttcctttcttttttggtgtacaaatgacgtttctctatccttggttactgataggtatcatgttggatggtactcaaatacagaatgaaaaatgtgatagattgattacgtatggacgaaaagatatacaatagaaaatataattatgaaaattgcaatagatgctcgacttataggtaatagtggtattggtacgcatattgagaatattgtatctatgttaatctataagtatacgaaacatcactatcttttgattggcagtgaaaagcaaataggtctataccaaggtatacccaatgtcgatttattgattacaaacattcctcaattttctttgaaagagctgtgggcatttcctgtgaaagaaataaataggtgtgacatttattattgtccatatataaatataccaggcagaattaaggtccctatttattctacaattcatgatgttttattttttgatgttaaagggctttcttctcgttggggaacgttattaagatgggcattttataaacgtgcggtttgtctgtctaaggctttatttacagtttctgaattttcggctaccagaataaaaaaacatttccatacaaataaagatattcatgtcattctgaatggtatttctaagcaaattaaggaatataatcccataaaagaacgcatatatgattttccatattatgtatatgtgggaaatataaaaaaacacaaaggtattgatgtattaattaaagccattaatgaagttaacaagcgtggattttatataaggttggtattgattggtgactatgagagaattaaaactaaagataggtatgtaatggatttgctgaaaagtgctggtgataatatactatttacgggagttctctctaataataaattatatgatattgtatctcaggcattagctttagtcttaccaactcattatgaggggtttggtataccaccattggagtctttgtatcttgggggaaatgctattattacagatttaccagtattacgggaggtgtattcggaacttccggtggttttctttaaagatggtgatataaaagcattggcagattggcttgtggtaagaccccagcttaatacagatattatgcaaacacgacaatatatcgagtctcattatagttttgatttagttgtggaaaaaattatccgagttattgagaatgggtattaggaaagatattctacccagactttgaattaatgagttctctttaaatgaaaaataatatgaagattgccatcattcaagaatggttagtaactgttggcggttctgataaagtagtcaaagctattgcggatgtatttcctgccgcagatatttacaccttagttgctaaaaaacaagtttgtgacgaattagggattgactggaataaagtccatacatcattcattcagaagttgcctttaggggtaaagaagcataggatgtatttgcctatatttccgtttgcaatagaacagtttgatttacggggatatgatgtgattatatcatcttctcatgctgttgccaaaggagttataaccaaagcggatcaactgcatatttgttattgtcattctcctattcgttatgtatgggatatgtatcatgaatatttggaagaatcggggttgacaaaaggcttgaaaggatatctggctaaatatatgcttcaccgtattcgtaaatgggatttgatatccagctttcgggttgactattttataagtaattccgattatgtgggacgtcgaattcaggagacatataggcgggatgctgtaacaattcaccctaatattgatatttctaactttgatttgtgcgtagagaaagaagatttctatttaactagtagtcgtttggtgggatataagaaaatagatcttattgttgaagctttcagtcgtatgtctaataaaaagctggttgtgattggtggaggtcctaatttggaaaagatacgcaagattgctgagcataatataactgtcatgggatatcagtcatttgccgtactaaaagaaaagatgcagaaagctaaagcctttgtttttgcagcagatgaggattttggtatgattccgattgaagcgcaatcatgtgggactcctgttattgcttatggcaggggaggttctttggaaacagtgaaagacggagtaacaggtattttcttttatgagcaaactgttgattcgattattgatgcagtagaaagatttgaaaaactagaaacaccgtttgatcctaaaatgatacgtaaccatgcggagactttttcggaagaacgttttaagaaggaaataaaggagtttgtagagttaaaatataatgaatttaatcatctagtgaaatgagttattttatatttggcggttccggttttatcggtacgcaccttattgctctaattgataatttatatccgggtacgaaaatatacaatctggatattgtggagaataaccatgaaggtaaatctacatatatcaattgtgatgttcgttctgaaataaatattgatattcccgttacttccgaagacatcatctttaactttgcagccgttcatcgtactccggggcatccggatcaggcttattttgagacgaatattcgtggtgcagagaatgtatgcgcttttgccgagaagttcgggataaagaaaatagtttttaccagttccattgctccttatggtgcagcagaagatttgaaaacagaagagatgcttcccacaccgaacacgccttatggaatttctaagttagtggctgaaaaaacacatgcgatttggcaggcaaaaaaaacgaacgaacggcaacttactattgttcgtccgggtgtggtattcggtaaaggggaaaatggtaactttacccgtttgtattgggggatccgtggtggtaagttcttctatccgggtcgtaaagatacgattaaagcttgcatttatgtgaaagaattggttcgctttatgctttaccggttggagaatcatagcgaaggagtagagttatataactgtacatttgaaccggcttttactatcgagcaaatagtagaaacgatgaaaaaggctacgggattacaacgtaccattgtcaaggtgccgggaagtcttctaatgacagttgcaagtattgtcggtccgttagggggaaaggcactaggtatttgtccggctcgtgtgaagaagttaatgatctctactaatatatgtggaaagaaactggctgattcggggtataagtttcattatacatttgaagaagctattaaggattggtatagagataatgatggtcagtgtttgagatgatttttcttaaacaatttgggtatatataataaatgttgaaaatgttgagatgtaataaacacgtgagtgtttcgtatgtgagatgaagaaaaatgtaggtccctagcttcatgctgtttacagcatgaagctcctacattgtggattagaaatagcgcgacggcgcatttctaatctacgccctgacatcggaggttaaagccgatgtgaatttcccactatatcaactgtctgtgaagatcgttgatatttcctgattttacgtatagtgatgtatttagatacacaaatataaagaaaaaacattgggagatttgtatcgaaatatcccaatgtttgatttcaattattgagatgtttttttcaaatctcccgatgtttttccagttctccaaaaggacaaaaggacaaaaaggacatatatgactgttattattcatcttagtataagaatcatgaggtatattgctgatttttattatgttaagtgattttgtagacgtgtaaccttacgaatattgaaatcgtgtattgcgccaacctgaatcgttttgtctgtcatgaagtgattgggcaactcttgaacgaaattacctatattgtcaggattatttagtgaaagggctgtgcttggaaagaagagcgacatcttgttcgcgtttgcttccgtcttcagtaacacaatcattcgacaataaggtaagattattgtacgaatttcggggaaataaaggagctcctttctggaattcctctcccaactaataggcttcgtcgttggcattggaatttttatagtaccataggggatttttgtccttatgtccttttggccttttgaaaggagggcacgttggtgggggaaagaagaggtgtatgagatttataacttgcttgtatccagtcgataaactcttgttgtttttttagggacgaaaaattatatgctcgaaaaaatgcaggaagctcacgcaatatgcttttttgcgaatagtgtcagtgacagttgattttagcagtgaatcgctgattgtttccctatgtggacaatgtttgataaagtaataaaaactgaaatattataaattattaatcatagaatgacatggcaaaagaaaaacagaaaccatacgagtttttaagcaatttggtattggctttaatgggaacggatcgtattttcagtaacagtttcttttccagcgaatttgctatctctcccagtacactgagtgagataagacggggagaggatatgtgcatttatcagtatgtacgggtgatacggtgtatgatgaagtatcttcatttaattgttcggatggatatgttattgaaggaattaagagccgtattagcttctaattgtgatttggtggttgctacgattccgcaccgttttcacggaacttaccaaccgaaagagtgggtggtagtaatgcattgggatggtataagataaatgttgaaatgaagaaatatgtaggtccctagattcatgataaactcatgaaatccctgcattttgcaggttagaaatcgtacagcggtatatttttaacttggccctcatatcggtgtaaaaactgatatgtatctatatgtgaaatatgccagctgtctgtgaggatcgttggcatattgtttttaggggagatgttggttaacgctatctttttgtctgtttaagaaaaaataataatgtcttgtataatacctgttttcggatttacttgttatctttgtgatatatatataatgtatatatgattgatatggaaaatttgcaaagattatatcctatcgggatacagacattctcgaagatacgggagggaaattacctctatattgataaaacagaatatgtttaccggatgacacattcggcttctgactatatgtttttaagtcgcccacggcgttttggaaagtcattgctcacttctacgttacacagttatttttccggtcataaagaactgttcagagggttggctattgagaagctggagaaagaatggatggagtaccctgtactacatttcgatatgagtaccgccaaacatgtagatgaggaacagttatttcaagaattgaatttgaaattgttcaattacgaagaaatttatggaaagttagaggaggagattaatcccaatcaacgtttgatggggttgataaagcgtgcttatcaacaaacaggtaagaaagtggtcgtacttatcgacgaatatgatgctcctttgctggatgtggcgcatgaacgggaaaatcttgatgtattgcgcaacatcatgcgcaacttctacagtccattgaaagcgtgtgatccttatttgcgatatgtgtttctgactggtattaccaaattctcccaactcagtatattcagcgaacttaataatattgagaatattagtatggatgaaccttatgctgctatctgtggtattagtgaagatgaaatacgttctcaaatgaaagaagatgtggagggattggcgaagaagttggagattactccagaagaagttttgatgaaactgaaagaaaattatgacgggtatcactttacttacccgtcgcctgacatatacaatccattcagtctgcttacagctatggaaaaaggtaagattggttcttattggtttggcagtggtacgcctacatatctgataaagatgctggataagtttggcgtagtaccttccgaaatcgggaagaaaaaggccgctgtagaggattttgatgcaccaacagaaaggatgacaagcattatcccgttgttatatcaaagtggttatattacgataaaggactatgatgaggaattagacttatatacattggatatccccaataaggaagtaagaataggcttaatgaaaagtcttctcccatattatgttgttagtaaagcaccggaaaccaatactatggtggcgtatctttctcgagatatccgtaatggggatatagatgctgcattgcgtcgtttgcaaatgttcttgtccaccatacctcagtgcgataatacgaaatatgagggacattatcagcaaatattttatatcatattcagtttattggggtattatgtggatgtagaagttcgtactccccgtggccgggtggatatggtacttcgtacagaaaccacattgtatgtgatggaattgaagttggataaaggagcggatagggcgatggaacagattaacttgaagaattatcccgaacgttttgctttgtgtgggctcccgattataaagatagctgtcagttttgatagtgaacgatgcacaattggggaatggaagattatggaaggatgattatgttttttaggatggttaaagaatacaaaaaaagagcaaactcataatattcctaaatctttccagaatctgtatcgttatttgtagcatagaataaagtatagtattaacgctaaaagaataacgattatgaagaaaattctatctttacttgtgttggctattgtagccgtacagttttcatttgcaaaagatgtaattaccaaagacatgaatcagttaccgcttccggcacgtaattttatcaatagtcattttacgaaaccagaggtggctcatatcaaaattgataaagatatgatggagtctaccaagtatgaagtagtattgatggatggtacagaaattgattttgatagcaagggcaactgggaagaggtaagtgcaaaaaaaggacaggttgttcctgttagtattattccgggatttgctgtcaattatttgaagtctcataattttgtgaacgaaggagtgaccaaagttgaacgtgaccgcaaagggtatgaaatagaattgtctaccggactttctttcaaatttgataagaagggaaagtttatcaaggctgatgattaactgaagatttgtgataaatagacctaaacaagaagatagctatgtggagatttaagtttagcgcttgggcagtggtattgatgatgactgctctttcgtttggcgcatgtgataatgatgatgatgatacttttgttccgcccagtaatattacagaagctttaaaacaggtatatccggctgcccagaatgtagaatgggagatgaaaggtgcctattatgtagctgactgttgggtaagtaatgacgaactagaggtttggtttgatgccaatgccaattgggtgatgacggaaaatgaactgaatagcatagaccagctggtaccggcagtttatacggctttcatggattccaagtataatacatgggtagtgacggatgtgtatgtgttgacttttccacaaaatccgatggagtctgtgattcaagtgaagcaaggtagccaacgctatgcgctttatttcttacaggaaggcggattgctacatgaaaaagatattagcaatggagacgatacaaattggccgccgactgaatagtttttaatcataaaaatcaaaacgggctatttctataaaaggaatagcccgttgttttttataattacatttgtttataatccttagctaaccctccttcacttgtttctttgtaaagtgatggaaggtcgtgtccggtttgtttcattacttgcacaactttgtcgaaagagacacggtgcataccatcggtgaaagctgaataaagattagcatccagcgcacgtgcagcggcgtatgcatttcgttcgatgcagggaatttgtaccaatccgcataccgggtcgcaagtcattcccagatggtgttccaatcccatttctgctgcatactcaatctgtgccgggctacctccgaataattgattagcggcagccgaagccattgcgcaggcaacgcctacttctccctggcaacctacttctgctccggaaatagatgcattgaatttgacaatgttgccaaacaatccggcagtggctaacgcgcgtagaatacgcatatcactgaaatcacggcttttctggagatgatatagtacggcaggcatcactccgcaggaaccacaggtaggagcagtcacaatttttccaccggaagcattttcttcacttactgccaaagcataagaaaaaacaagtcctcttgattggagggattgtttatatccggtagcacgtatataataggtggaagcttttcgtctaaggtttagtgggccgggaagtactccttccgcttccagtccacggtgaatggcatctttcatggtggcccacacttcagccagataatcccatatatcttcttcctcacattccttcacgtattcccaataactttttccggtatcttcacaccattgaagtatttcggtcatgttttccatgtcatatacatccggactttcgatggtcggattatcattattttctgccagtgcaccgccgccaatactgtaaacagtccagttttcctgcactttatcattactgtccagagctgcaaatgtcattccgttgggatggaacggtaggaagactttgggctgccatacaatttctaccggagcgatgggttgtaaagtgtctataatagctatatccgtcatgtgccctttgcctgtagctgctaaactgccgtaaagggttactttaaaagatgtggcatccggatgacgttccagaaacatttcggcagctttgcgtggtcccattgtgtggctactggaaggtcctgtacctattctatatagctctttaattgatttcatgactaatgatgtgtttttgttaataccatttcttttttctgaagtacaaatatacaataataccgataattgccattataatccaggcaaataaatacccgtactgccattccagttccggcatccatttgtaattcattccccatactccaaccagaaatgtcaaagggatgaaaatagtggatacgatggtcagcctcttcatgatatcgttcatacgcaaatcattattggagatataaagatcgactaatgaagaaagcgtttcccggcagatttcgatggtttgtaatacaaattgcaagtggtcgtttacatcattgaaaaaagcacggttcactttatggatgagcaggttttctgccctcagtagctttatatattgttcttttaaggggagaattgcttttttcattagcatatattggcgtcgtaatgcctgaatctggataccgatgtcgtctccgctggtgatggttagcaattcttcttccaaatcttcgagtgcgtcatcgatggaagagatggttgaaatgtagtttcccatcacgctgttgagcagtacgctaagtagataatctgtttgacggctgcgtatcttcagaacatcattacgcaaggcagaactgacatcatcaaagaaatcagtttctttttcgaggaaagtcagtacataattatttcctatgataaggcagacttgctgttggagcagttcgtccagttcattttcttctttatgttcgttcggatagaatatctttaagatcaggacaatgtatttatcatgttcttctatcttggtcggatgatccgcattcaatatatcttgtaagacaaggaagtctatttcgaaatgactgcaaatttcccggatagtttctgtgtttttcattccatgtatctgcagccagttgatttgatcgttgttcagcgtacctttgatggcttgaaaagtatcactagaactttcctgcatctcggtagcattgtaagtacaaagatgtaaatgggtaggagtaagactttctcctgtataaataagcttttcgcttaacagattattcttcatgctttattctcgttttagaaaaccactgtaacaaaggtagtggttttctaaatgagaacaagttctttgaacgttttgtttacgtgttagtcaaaatcgactactgtgattccggcaccgccaaactgtacatgttcgtcggtatagtggctgactcccggtacggtggccagatattggcggataagtgtacgaagtattcccgttcctgtgccgtgaaggatacgtacacgatccatgccgactaatatggcgtcatcgataaaataggtgactgcctgtaaggcttcatccccacgcattccgcgtacatcaatgtcctgtttgaagctaagcttcttttcatacatctgatcgtgtgtctggctgctgacaaaggtgctttttgcaatcccttccgtcttgggcgtatgattggcacgttccagacggtctatttttacggtcgtttttatgcttccaaaagcaacagtcgcatttttaccactgatttccatcacttggccgacgcttgtctgtcctttgatttttacattttctcctactgcaatcggcactattttaggggcacttgaggcagaagagactgcagctttcggttcgctcttcttgtttttcttccgctcttgcttctcctttagtttctccattttttgtgcaatcttctcttcatgctctttagatgccagtgcatccaaagaagtacggaagtctgtcagttcctgacgtgcctggcgtgtcttttccttttcggcttgcgcttcctttatcgtacgaatcgtattttcaatgcgggcattggattcctgaagcatgcgttccgcttcttcttttgcttgccggataatctctttccgggatttttgcaattcttccatctctgtctggtaacgggcaatggtttcttccatgtgcttttcccgttgacggatggtttgacgtttcccttcccagtaacgcttgtcgcgtacaatgtcctgaaggtatttgtctgcattgatatattcgcttcctacgatttccgaagcatctgcgatgacatcttccggtagtccgatttttcgtgcaatttctacggcgaacgaacttcccggattaccgatttgtaattggaaaagtgcttgcatgagatgacggtcgtaaagcatggctccgttcactactccttcatgatcttcggcaaaatgtttcagattctggtagtgggtagtgatgactccaaatgttcctttctggttgaaacgtttcagtacagcttcggcaatagcacctccgatttgcggctccgtacctccaccgaattcgtcaatcaggatgaggctccgttcgttacagctcttcatcatgattttcatattggtcaagtgagaagagtaggtactcaaatcatcttcaatagattgctcatcaccaatatcgataaagatgctactgaatataccggcatgactacgttcgtgcaagggaatcagcatgccgcattgcagcatatattgcagtaagccgactgttttcaaacagacggacttacctccggcattcggtccggatataataaggatacgttgtttttgatcgagctctatatccagtggtacgactttctttccatgtttggctaatgaaagttgtaataaaggatgcactgccattgtccaatctagtagttgctcattctctacggcgggtttcagactattggtctgtatggcgaagtaacttttcgcacggataaaatctatctctgccagaaattcgtatgattgaagaatttccggaatagatggacgaaggatattcgagaactcggtaaggatgcgaatgatctcacgtcgttcatcaccttcgagttcacggatgcggttgttggcttctaccacttccgccggttctataaacacagtttttccgctggcggattcatcgtgtacgatacctttgatttttcgcttgagtccgggggcaactggaatcaccagacgtccgtcacgcatggtgggagctacatctttgtccacgtatccttcggactgcgcgctacgcaggatgctgtttaatgaacgggaaatatttcccatcgtactggcaagttctcgacgtatgcgggctaattcggtagaggcattatccttgatctttccatatttgttaagaatgccgtctattttccctatcagttgcgggaacacggcaatatctcctgccagtcgtttcaggctggggtagggggtattgttttcttcttcatcttcattccgatgcagaaagcgtacaatgtcacggatggtttctaatgaacggcgtaggtcaaataattcttgttcgtccaaatacattccttctattcgcacacgttttagcgaaggacggacatcaaagaaaaattgatcgggaaatccgtcctcttcctggatgatgcggacaaactctgttacttggtttaatttctcctcaacctcttcatgttgctcggaaaagttcatgtctgtaactctttcttcacctaaagtactgaggcacttatcttttagtaactgtcttatctggtcgaatcctatcttttgctcaaagttttgagggtatatcatatttctgttcttactaatgaactgcaaaaatacgattaattcgcgaaaaaaatatcagaatgtttgcagatttaaaaatgattcgtacctttgcaccgctttcaacggaaagcacttctgataaaggagttttggagaggtggcagagtggtcgattgcggcggtcttgaaaaccgttgtactgcgaggtacccggggttcgaatccctgtctctccgctgaacttactggacagaaatggacagtaaacggacaaaaagctacaaatcaatgatttgtggctttttttattgcccgaaagtcctgctttcaagacttcaaaagtacggtaaaagacaaagtttcgttactaaatcgttacctattccccaccggacaaaaacggtaacgatttgtccataaatgacctgataatgacttgattagtccatagtctgcataactcagaaacgagaggtaaaaagtaattttgcaactaaaaaaagtgagttatgaaatcgacattcaaggttcttttttatttgaagaaaggttctgaaaagaaaaacggcgaggtaatgattatggcacgtatcaccattgacggcaaacagtgccagttcagtacgaaacagagcatccagcccgataactggagcattgccgcaggcaaagccaaaggcagggatgccggaagaataaacgccctgctggacgacatacgttcttccctgaacaccatttaccacgaaatgcagcggcgtgacaactacgtgaccgccgagaaagtgaagaacgagttcttgggacacagcgagagccacgaaacaatcctttcattgttccaaaagcacaatgacgatgtgaagcagcttgtgggcatatccaagacgatagcgacctaccgcaagtatgaagtgacccgccgccaccttgccgagttcatccgcagcaagtacaacgtatcggacatatccattaaggaaattactccaatgttcattaccgattttgagttgtatttgcgtaccgcctgcaagtgcggttacaacaccaccgccaagttcatgcagttcttcaagcgcatcatcatcattgcccgcaacaacggcatactggtgggtgacccgttcgccagctacaaaattcggctggaaaaagtggataggggctacttgacggaggacgagataaaaatcatccttaaaaagaaaatggtttccgaacggctggaacacgtcagggacttgttcgtcttttcctgtttctgcggtttggcttacagcgatgttgccaacttgcggcaggagaatatccaaaagtcctttgacggcaacctttggataatcaccaagcgggtaaagaccaacacggacgtaaatgttcccctgctggatattcctaagatgattttgaagaagtacaagggcaagttgccggacggcaagatacttcccgtaatcagcaatcagaagctaaacgcctacttgaaagagattgccgatatttgcggtattaaaaagaacctgacattccaccttgcccgacacacgttcgccacgaccaccacgctgtcaaagggcgtacccattgaaacggtgtccaagatgctgggacacacaaatatagaaactacgcaaatttacgcccgcatcaccaacagcaagataggcagcgatatgcaggggcttgacaagaagtttgtcggcatcgagaaaatttacaaggaagtcgccatgtgagtttttagttacctatatactgttggtaacagaacaggtaacgatttcggtaacgaaattccacctaacaaactatatcccaataaagtacattctttcaccttgcgggcagtccaccgactacccgcattttttatatccttttcccactggcacattccccgaaacgccagccgtgcgtggcatggctgactgtatttcgtgaaaagagccgttggaaacccgcacaagcgtaccgcaaggtaaacttgccatacccttgcctttcccacccgcatggagtgttccctaaaagatgaaagagaacaggcacttttccccagtttccctatctgtaaatcttcctcttacgcagtcccccagccgggacagtcgttttaatcatttcaataggcaaaggtagttacgtgttcttcacgattttgcaaggtcgagccgttccggttgggcgaaaaaatcttccctgccttgcgaggtattttttgcccaaaaccttgcaaactctaaacactacccttttacgcctatgtgaaacgaaaacgaccgacccgaccggaagacgcataaaaaaaaagtcggatttacgggaaacaggaaaaaagttcagtgaaacttcaactccctcacctctcaaatccgcataaaattaaaaacttaaaaattacagcaatatggaagcaaaggtattatcggaagcaaaagtttatgtaggcacttatgccaagtacaacaacggttcattgtccggcgcatggctcgacctttcggactattcggacaaggaagaattttatgaagcctgccgggaacttcacaaggacgaggaagatgcggaatacatgtttcaggactgggagaacgtgccggagggcttaatcgacgaaagctggatttctgaaaacttcttcgccttgcgtgatgcggtggaggatttgagcgacaccgagcaggaagcctttttcgtgtggtgcaactataaaagccatgatttaggcgaggaagatgcggacgaccttgtacgtgatttccgggatgaatatcaaggggaatatgacgatgaagaagatttcgcctatgaaattatagaagaatgttacgacctgccggagttcgcaaagacctatttcgattatgaaaagtttgcccgtgacctgttcatgtgcgattactggtttgatgacggctttgtgttccgtgcggcataacaaccaatccgggcggggtgtcaaagccctgcccgttaaaaacaaccaagtttataaccgtaaaaaaataagacatcatgcagtcacttaacaaaaacggggtaagcatcacccaaacaccgggagaagaaaaatacgtgaaatgttgcttaggcgcattcaggggacagatttattttcaatatgactaccgccactttgacggcgaacttttcagcacggtagccaaaacgctggcagagtgccgccgcaggcgtgacgggtggatagcgaaaaaagaacagagtaataagtaaattttagggatatgaaaacgacagaagtaaacaaggagcttatcggcaagcgttgcgagtgtatttttacgggcttaatggtaacaggcgttatcgaggacacagaagaaaacgaacacaccatagaggtaaaagttcgtttcgaccgcccgcaccagtggggcgatgatttatataatgatgtgtgggcgtgggggcgtaaaattgacgagttcggcacgttgcgccatttgcaactgttggaggacaaaccggactttcagacaatgacggtagttttcggtgagccaatcagccaaatagaccgcagtgtttttgaagatgttgcaacgtggggtgtctgttccctgcaaggctgggtaaacagctatgaaagtgtccggtttgtagccataaacgaccatacggcggtcataacgggcgaatataacatggaacaggtaaaggtgtggttagagaaatacacgtccataaagagccttaaaatcagttgatagagaacggcggctgtttgccgccgttactttcttccgtgagcctgccagcgggtgaagaaagtaacaaagaagccgctcgtttccctatcatggaaacagcccgccgatgcttcccggcgggctgtctgcccaatatttacgctttgcgtatcattaaacgaatatcacagctacaaatcctcacagtgaataaattttacactaagtatgcacacggtttcttcttcctcgatgtcgtatttccaagtccgcttattgacaagcatttccgtgtcgttgtcaaaccattccataacgggcatatcttcttcttcgtccacccatttgaaaacctgattggacggtattttccacaattcagccctgtcacgtgcggaaatgcagtccttatccacgataatgatgtcacctactgccggaaccgtatctgtttccaacgtggtttctatataccacgagataccttttatatccaattctatttttaccatgtcattttattgttagggggttattgtttccgtttcttcttcgctgttgtcattattaaatgatagtgtaagttgctgcatctgtccgaagctgtcgataatataaatgtcaatcgtctgctggtctgtcgatgccgaggtgtagtagagccggaatgtttctttctccagcgggtaaaggtcattgggcaggaacaccgtgccgcccgccatttccagcttccctttgccgtccggctggaagtaccttatccgataggtagtcggctgatagtaaccctcacgcaccaactggcagcgtatttcagcggtttccccgactttcagccttttgggtactggcagcgtttcgatgctgaacgggtacgcctgctgaatatccaaactgtcattacaggcggtgacaagcacaagggcggccacgatgtagcagcccatgatgattttatacattacattcttcatatacattattatataggggtcagttgataatgaattttactcccaaagatacctgcgtgtggaacttgcctatgtccgagccgaacaacgcccgttcccttgcgttcagcagcagagccacccggtcggtcaggtaggcttccagttccagcgtgagcgcaccgccgtaaatgaagcagtccttatccagcaaggtagaaccgtccggcagcagtttttcgcttttgttgctcacctcatacccggcgagtgccgacaatcccagcgagaggaaaaaagtctttcgcctgtccgaaaggaatttcaggtaatagccgccctctgcggtgaactgttcgactggtatctgcatatccttgtagtcatacttcttgtgcaggtattccccaccaatcacccagcggtttgcgttcttggtgtaaacgctgtatgccgccccgatgtggtaggcgaaatccgtgttgtcattccaatgcaccccgtccgtcatgcccgccgtgacctgcaagcctttcatacccggcaggtatctttgtgcgtgtacctgaaacgaggtcaggcacagcgcaaagagcatcattataaagatgtgtttcttcattccctatttgattttgagttcgttaatcacttctgcgttcacgatgtcggcgttctctacccggataacctgatgccgcccgccgtttttctcgtagagttccaccaacagtagcttatcgtccggtatggtgaacttcggcagggcgtacacagtgcggacggtacttttcccggcaatctctactacctcgttgtaactgcgtaccgcatccagcaccgtttcctgaatagccgtgcgtttgggtactttcttatcgactatcttaaacttgatgaagtcggtatcgaaaggcacgttggaactgttcttcgtctgcgtgtgtacatagagcatcccgttataggtgtaaatccccttgattaagaactgtatgccgaaacgcttgctacccaagtggcgcactttgcggtcgttgttcttgtagatgctctgcattatcagtttcaccaatagcgggctttcgttgcccagttcccggaagtagatgttcatgcgggtatgcgaaaagtcagacgtatcttcattttccaagaagtctttcatttcgatattgagcatttccggttcacgggcgtatttggcgttgaacgaaaagaaactgccgtcctcgcaaatgacggagaagttcgtttcgcccggaaagccctctgtcgtggctttcacccggattacgttctccgcaccgtccgccttgcccgctatgatgtggttgcttcccaaatcgacatagcggacggcggcggggaagatgatatgcaccgtcttggcaaaggtcacttccacgccgtagggcgttaccatttggcggtacgggagtttccgggtaatgccccggtacaagtcgttgccagccgcatacttcacggtgtcggtttcctgtgcgtttgccgcacacacgcccagcaagagggcgaacattacaaaaatctgtttcattgttgattgaaattttagtggttaataattattgttgtttggcgtaaagcatcaccttgtacccggctttcagcttcactttcacggttcggaacttcttggcgaggtagccggacgttccttgcagcaagccccttgtcacgtccatagccacctgctgcccggcactttgggcaaaggatatgcttgtacccagcccgctaccgatgttcgccattgcttcgttgaacgcttcctgttccattgaggacgggacggacagccccttttgcccgtccgtgtcgaacacggcaagctccaccgggatgatgttgccagcgtactcaatcgaagacaccagtatgtcgagccgttcgccctgcacctttgccgtacccgctacaagggtatttttcggcacgactatgttccctgcctgcataggttcgagcagccggagtttcaccgcctgcccgtccgtcagcgtttggtcttggtggatgcaggcggctaccgtgttctttcccatagcgtagcccgtgcctaccgccgtgttgaagccgtagtttcgtggctggctgtaagcacggatgaagtcggcatcgttcatgggctgctgcaatcccgatacggtcgtttcccggattgcttgcacgggttgggcttgcggcttttgggtgacagtcccggcaacaggcacttgtgccacctgcccgttctgcccgccgtcattcatataccttgccgccagttcgtaggacttttccaagagtgccatttggtcgtcagtggtgggtgtggcgttctgctgttgttgcagtcggtcggtcagttccgccacctgccgcttcaagtcctctttttcctcgtccaccgccggggtttcgtagaacgtgcttaactggcggttgatgtcccggtaagccgcccgtgaagaagcaccgccgcccctttggggcttcgcatcatcttccggcatcaggtcgatttccgcttgcggttcttccgtttcatcgtcccccgtgaaaccgaagtcctgcaaggattgtatcttgtcctgctgtttgcggttcagcattgcttgttcgtatgccttttgcttgtcggctataatcccgtcctctgcgggcaggggtatgtcggcgttgaagccgcccacgctttccacattcacattctctttgccggagggggcgaatatcaggtacatgcacccggcaaaggcaaggaacatcagcgggaagactatcattttcctgcgctgctgtacctgttggggtgtcagttcctttttaggcttattttcttttgggggcttcccatttgttggtgaagtagatatgctactttcattcttctgtacttcgtccattgttcagtctgtttaataagttgatactgtcgctatcgtgtagcgggtattgtttgatgtgttctatttgcagccgcctgccgtcccgtttcccgatattgtagattgatgaaacggtgatgtagatagacaagccgccgaaaaagaagaacatcacgaggataaccgccagccttttgcccggcgtaatccgtccgcacatccggcgcaggcagtcgtccgcccagtcttgtacttttccgatataactctgtttcctttccatacggctatcttttgacggtttgtaaatccttgttttcggtaatggtgaacgcttcgatgatgaagccgtgcgggttgttgtcgctccgtgtggcgttgagcaggcggcacgaggtcacaaggctgcgcaccgtcaggctgctttcccggacaatcaactggcgggcgtaggtgttcaccttgtaggggtactggtcgaagtcgcacttcacgctgtcaatctccaccgtctgcgtgacgttccccgaaatcacccggttgtagtaacccttttccgccaagtccttgtaatagttgaaagcggtcttgtcggcaaggaacagtgagcgtttgatattactttcgatagcccccttgtcgggcgataaggtgaaaaacagttcgtgaaaacgccgcacgtgtgatttggcttccactggtctgttctgtgccatgtcctgcgagagtgccagcatcaggcttttgccgttgtcgaggacgtatatcttctgccgctgcttctcggcgaagctgtacgagttccacacggcaaagcccgtcaccagtgcgcacaggcagatgaataccagcgcaaagagccggatttgccggaaactcgtttcgatattgttcaatgacttaaattccatatccttaaaaaattgatgttgtttatttgagtagttttcccgatacctttccaccgactgcgccaaccgcagccccggcgaccgacccggctttcgacacgttgcggttataggcggacataccgccagccgacacaatccagcttgccaccgttggaatggtgaagtaacccacgatgccaataatcataaagattacatacacggtgctgctcccgtcagggatgaaattcgggtctgaaagttcctgaatatccttttggagcatcagcgtttgtatgcgagccagcacactgctgaacaagtccgacacgggtagccacaggtaaatggagatatagcgtgaaatccactgggtcagcgtgctttggaaaccgtcatagacggaaatggcgaacgctagcggacccagtatcgaaagtacaatcaggaagaacgtgcgtagcgtgtctataatcagccccgccgcctgaaagagcatttccagcaattccctgaaccagtcccggacggacttcttgatgttataagccgccctgtccatgtacatacccgtcatagtcaccatgtcggagggcgaccaccccagttcttccagttgcctgtcaaattcctcgtccgatgcgaggtaagccgtttcggggcttcgcatcagggcttcatattccagtcggtctttctgcgcccggtactcgttcatgtcgaaagtctgcgtttccataagctggttgcacccttttaccactggcgacaataccgtgttgatagtccccaacacgaaagttggaaaaaacatgatacacagccccagcgcaaagggacggagtagcgggtacacgtctatgggttcggcacgtgcgagcgactgccacactttggcggctacatagaacaaagctcccagcccggctatccctttggctacccccgtcatgttgccgcacaagggcatcatttcatcgtacagcacccgcaacacttggtgcaggttgtcaaaatccactgctgctaataacataggcatactaattaagtggttgtatcatgttaccaatagcgttcatccgccgagccgtagagagccaacacccggtcggtgtcgttcttcttcttcgcccgcaggtaggacacggatatgttcttgcgggtgtagtagttcacaaggttgcggtagttgagcaaacttcgataagcgttgtcgatgattgctaaccgttcggcatccgtcagcgacatacccgtgatgttcactacatttttcaagtcctgcaacacgtccgagctttccgacatcagtttggcatagccgaacgatattgcggaaagttcgtcaggcgtgaaattcgggtctgccagcatgttttggaaattgcgcacgtagatttcggatatttccgccaccagttcaatggacttcttcaccttgacaccgcccttaaccacgtcatgcaccgctttgagcgcatcgtaatattttttaccctgctggaaaatcttctgcgcttccataaagccgtccagcgtgttcttggctgtggtagaggtctgcactatctgctttgtggtgttaatgataccctgtgccaagttgccggggtctgacaccacccactgggcggatgccctgccgatgaagcaaaggcacaccgccataaagaggattattttcttcatgttcctaatttttaagttgttgatgattggggattacgtttgctttccgcaagccgcttgatagccagttcaaggttgccgcccagcttctcggcgagggcgaacagttccattttctcgctttcctctgtcgtgaacgtgtaatattcttccagcgaaacttctgtggcgtacactgccgactgcgtgccgcccagcgagaagaaaacttccttgtacttccgtccggggtggttcgccatgttgatagacaatatttgcgaacgctccttgtcggtcagtcccagcaggttttgtatgctgtcgaacttgttcaggtattttcgctggtctaacaggattttgcagtccgagttgttgatgatactctctttcacgattggggaagaaataatatcctcaatctcttgcgtgactacaatcgcttccccgaaatattttcggactgttttgtagaggtagcggatatagtctgccatgttcgccgatgcaatcgctttccacgcttcttcaattagtattaacttccttattccctttaacttgcgcatcttgtttataaaggcttccatgatgatgatagtcgttatcgggaataaaatcttgtggtctttgatgttgtccaattcaaagactatgaagcgtttatgcagcaaatccagttccttgtcggagttcagcaggtagtcgtattcaccgccacgatagtacggttcaagcacgttcaggaaattgtcaatgtcaaaatccttttccctgacgttcttctgttcaagctgtcggcggtaatcatcccggacaaactcgtagaacgtgttgaagcagggtgttaccgacctgtcacccgtgatacgttcgatataggcacttaccgcattggacaacgccacttcttccgaccgcttcggggcttcatcgtcccgcttccaaagggtgagtatcagggtcttgatactctctttcttctcgatgtcaaataccccgtcttcgacatagaacgggttgaacgctatcgggttctcgttggtgtaggtgaaataaatcccgtcctcgccgtgcgtgcggttgtggataagctgggacagccccaagtaactgttacccgtatctaccagcagcacgtgcgcaccctgctcgtaatactggcgcaccatgtggttggtgaagaaagacttcccgctaccgctcggcccaagtataaacttgttgcggttggtggtgatgcctttcttcatgggcaaatccgatatgtcgatgtgcagcgggcgaccgcttaccctgtccaccattttgataccgaacggggaaagcgaactcttgtagttcgtttcttccacgaacaggcagagagcctgccccaagaacgtgtagaaactttcctctgcggggaagtcggcttcgttgccgggtatgcccgcccaaaagagcgtgggcgtgtcggtggtgttgtggcgtggcttgcactccatcagggcaagctggcttcccacatcgttgcgtatgcgtttgagttcgtccctatcgtcactccatgccatgacgttgcagtggcagcgcaccgagataagccccttgctatgcgcttcgttcaggtactcgtctatccactccttgttcacttggttggcacgggagtagcgggagagcgattgcatattccgggcggtctgctcgaagttcttcaggttttcggcgtggtcgtctatgaagatgaactggttatagacgtggttacacgacaacagcacgcccaccggggcggcaaaacttaacctgcaatcgctccggtcagtagacagcttctcaaatcggcagtccgtcccgacctttccgggtaaatcttccacgtccgaaagcgtgtgcaggcacagaatatcgtccccgacacgcatttcttccgggtacagcccgatgtctttcaggcaggtagtatcggtttgcgagagcgagaagtatttctcgatgatgcccgccttgccgtcctgcccggtgatttccgatgccgccagccgggtaagggtgacaaaaccgctgtcgttcatgatgcgctcgaactgcccgaccgcttcgatgaactttgccgccgcttccttgtcggctatctcctgcggaacaatcctgccccggcagagggtggagaagtcgctctgtcggcggcttctctcccttgtcgttttcgtcaggaacaggtagcagtaatggttcaggaacgggcgttcattgaagtgccgttcaaaggagcggcttaaaaaactaagctcgtccctttcggtgtcgggctggtagctctccttgatgaagaagtcctgcttgtgtactatggagtagtcgggcagcaccttgattgccttgtaccatgccgaatgtatggcttcgtactcggcactggtgacggtgaacagttcgggcagttccacccggaaagccaccgttatgtctgcatcttttgaaatgatgcagccgttctccaccgccaaaagtggaaattttctttccagcgtggtagcctttaatgtattcctcatgttctttcttcctttcttcttttgtagttgaacagccggggtatcgcctttcggctgataatgaagcgtgggtgtcttttgcgtgcggctgctttcatcagcccgtgcgtgccgtaccgtgcgttgagccggaacgtctgccacacgagcagcagcgaagccgacacgatgaaaccgatacatagccactggttcacgcctgccatgaacaggacgatgaacaccacgaacacggcgagcaagccgccgcaaaagataaagaggtactggctttttaaccccttgaattccactggcttcccgatacccctgtttaccggatattcagacatagccgctggtttagaggaagaacgaccgcaggatagtggcggcaacaattaaaaaaatgcacgccccgaaccaactggcggcggtctttgaggtgtcggggtcgccgctcgaaaatttgttatatacttttaccccgccaatcaagccgcagaccgccccgattgcgtacaccagttttgttccggggtcgaaatacccggtgattaggttcgtggcttcggtgatgcccgcttgcccgttgccctgtgcgtaggcacttaccgcagcggcaaggatagccgccgacaaaaagattttctttctcattgtgatttgtttttaatgccgggcggcgggtgggaagtccgcctttcccggctggtgaataatttgaaattttagtggtcggggatagtcccgtttgtctgtttggttttcaggttgccaatcaaccgtagtcacgttgcttcatattgttacacgttattatattataggaaatcgttcatgtcgaacgcttcgtgttccttgcttgtattgccagcttcggcagggacagcagccgtagccagttccgcttcgttgcgtcccagcagttccgccacctttgccagcccgccgttgatgttctccaccaccgcatcgtagaggttcgtcccctcaatgcttgccagtgtcccggctgcttgccgtttctccgtttcggtggggttgtcggcgttcgccgtgcgtaccgcttcgcccagttcgtcaaagctcacgcccgtagcccgcccggtatcatcgtcaccgtccatgtatccggctatttcctcgtcctcgtagtcgggttcgtcattctcgtaaccgggcgtttcttccgcttcgggtgctgcttccgaaatgttttcttccggctgtccgtcagcctgcggcgcaaaaatagtatcattttcaaccgcttgcgggaggtgtcccgatttgtcctgcgctgtcccgattagtccgcccttgtattggctttcacctatcagcgtgtagcctgaaaccccgtttcgtggaagcagcgcatcatccgttctgcccggtgatgtccggctgtccgtgtagcgataccacagccataaggcgatatagtacaccaaaagcccggtaagtatgcaatagattaccataatcagacaggcttttggaagtggctttcgtacagggtgtttatctcgtcttggtactgctcgaagtggcgcagcagaatgttttccacgtagctgcttaccgtcaccttgcgcccgcctatcaccgtcacgatacgcatcagcttctcgtgtgtggtacggctcacgtacaagggctgtcggtctgccagttccactttctgaaagtaggtttcccggtagtcacccgaaccgcccttgcgcttgcggtttgtcgttttctccacccgcaccgtttcagtctgccgtccctcgtgggcggtttccgtttcgccgccgggctgcggtgcatcatccggctggctctcccgcttggctggtacgccctgcgagataagttctttcatgaaatcctcgtctatcttcggcatcccgccgctttgctttgccatatcattgtaatttgatgtagtacgttatttcggttatcagttcttccaagttgcttccccttaccagcgggcggctggcgggaaagagcgtggagcggaacaccgcctttttatctgccaccagttcctttttgtagcgtttggtatcggggataaaggttttcatcagcggcagttccagttccttaatggttttgtcataggcggtgtaaaggtctgttttctccctaccgtccaccatgttccaaaagaggtacagcccggcaagtcggcaggcttcattcctcaccaatagcttttggatagccattgcaaacgacaggctgctttccagcaccaccttgtcggctgaaatgggggtgaaaatgtagtccatgcctgcaagggagtttatcacgccctcgctgttcaccgtgccgggcaggtcgaaaaacacaatatccggcacgtgtccggcggctatatgtccgtcagccgttgcaatcgccttttcgggcgaactgcatagcaccgggtaggctttcttccccagccgggtaaactgttcatacgccattcgcttgtaatcttcatccgccccgacctgctcggcatcccgctttcgcatcccggcaatggagtgttgcgggtagtcgcaatcgaccaccgccacatcgtagcctttgaggtagtagaggtaactcgccgccagcacggtaaaggtggttttgccgaccccgcccttttgtgtggaaaaggcgacataaaggggtgttttctcgttttccatattgcttccgttcattattggttgatagatttatttattgctttcaatcaatccagccatatagctttctttgtttccatattgcaatcttgaaagattgttttatttcaatcttgttttcttgctttcattttttcttggaatattgaaatcctgcaatcacattttcttgaaatcatgctttcaatcattctttcctgattggaatatttctttcaatcttgctttcaatcttgaaatccgatacaaaaaaaaggagaaaaaacgtcccctgaaaaccttgtcccgatttgtcctttgttgtcccgatttgtccaccaaccacctattttacagcattataaatcaccgttactttgcagcggagtaacgaaccgctgggggcagggatgtaaaaccgggcaggttaatggctgggctttccgtttcacgctaaccccaatccgtccgtgacggattttgaatttcgtcagaaattagcaaggtgtgttttgtatgctacaaaaccgttttccgtgcctgaaaacgccttgccccttgcggggataaaaatcactccgaagtcgtaattttttaattcaaagaagtatggaaacaaggaaacccaacaagggcggtcgccccgccctcgcagacccagcgaagcaccgccatgtcctttacctgaatgaccgggagaacgcccgcttcctctcgcagtgggagcagtcgggcgttacgagcaagtcccgtttcatcgccgcacggctgttcggtgagccgttccgggtggtgaaagtggacaagtcggcagtagaatattgcgcccgcttgaccgaattttatgcacaattccgggcggttgcggtcaattacaaccaaattgtaaaggcgttgcacagcaacttttcggagaaaaaggcactggcttttctctataaactggagaaagcgactaccgaactggctatgttgaaccgtcaggttatcgacctgacaaacgagtgcaaggaactatggttgccaaaataagcataggcggcaatatgttcggcgcactggcatacaaccaaaacaaagtggacagcgaggaagcaaaggtgcttttctccaacaggatgctgttaagcgaggacgggcatttcagcatcggcgagtgtatgcgcagctttgaaatgcagatgcccgtccagctatccaccaagaagccgatactgcatatttccataaacccgcacccggaagacgtgctttcggacagccaactttctgacatcgcacgggagtatatgcggaaattgggctatggcgaccagccttatttggtctataaacacgaggacatcgaccgccaccatatccacatcgttggcttgcgggtggacgaaaacggcagaccgctgaatgacaagttcgagcatcggcgcagcaagcaaatcacccgtgaactggaacggaaatacaacctgcatccggcggagcgaaaggaacgtgccgaacgcccggaacttaaaaaggtggactacaccgccggggacgtgaagtaccaaatcggcaacgccgtgaaagcggcttgctacggctaccgcttccagtcgttcggtgagtacaaggctttgcttgccacctataatatatgtgccgaggaagtcaagggcgaggtaaacggcaaaccctatcagggcattgtctattccgctatcaatgacaagggcgaaaaggtgggcaacccggtaaaggcttcccgtataggcaagtcggtgggctatgaagcggtacagcgcagaatggagaaatcgggcgaagcaatcaagaacgggaaactgaaagagcgtacccggaaaattgtagccgatgccgtgaggaatacccgcagccgaaaggaactggaacagcagctaaagaaacagggcattgacgtggtattccgtcagaacgacagcgggcgcatctatggcgttacgttcatcgaccacgacagccgggtggtgctgaacggttcacgattgggcaaggagtattcggcgaacgtgttcaatgaacgcttttcgggtgaaaccggatatatacaccaacccgaagtggaaataccgcaacgggaacaatccacgcatcaggaacagctggacttcacaccgaaatccgacatcgtttcgggtgtggcttccgtgctgggtgctctcggcggtctgttgggcggtggttcatccggtggtgacgagccgcaggacaccgccaaccaaaagagaaagaagaagaaaaagaagcgcacaaggcgcatcgaataaccaaaaaacattacaatcatgcaacaagaagatgatttaagagggcttgcaagggtcatggactttatgcgggctgtcagtattctattcgtgggaataaacgtgtactggttctgttactccaccctgaaagagtggggagtaacttttgaggtgatagacaagatactgtggaaattccagcgtaccaccgggctgttctcctctatcttgtggacgaaacttttctccgtgatgttcctcgccctgtcgtgtatcggcactaagggcgtgaaagaggaaaatataacatggacgaagatacattgcagccttgtggtgggtatcatgctgttcttcctgaactggtggctgctggaacttcccctgccacacacggcaggtacggtgttttacatcaccacgctgtcggcgggttacgtctgtatgctcatggcgggtacgtggatgtcccgcctgttgaagaacaaccttatggatgatgtctttaatatggagaacgaaagtttccaacaggaaacccgcttgattgaaaacgaatactccgtaaatttgcctactcgattttattataacaagaagtggaataaaggttggataaatgttgtaaacccgttccgtgccagtcttgtattgggaacgccgggcagtggcaagtcgtatgcggtggtaaataattacataaaacagcaaatcgagaaaggttttgcactctattgttatgattacaaattccctgacctttcggaaatcgcttacaatcatctgcttagccacttggacggttacaaggtgaaaccgaaattttacgttatcaattttgacgacccacgcaagagccaccgatgtaacccgataaacgccagcttcatgtcggacattgcggatgcctacgaagccagctacacgattatgctcaacttaaaccgctcttggataagcaagcagggtgactttttcgtggaaagtccgattatccttttggcggctataatttggtatctccgtatctatcagggcggtaagtattgcacattcccccatgccatagaattattgaacaagaaatacgccgatgtgttcacgattttgcgcagctatcccgaactggaaaactacctttccccattcgtagatgcttgggaatcagatgcacaagagcagttgcaggggcagatagcgagtgcgaaaattccgctttcaaggatgataagcccaacactgtattgggtaatgacgggcgatgatttttcactggacattaataaccccaaagagcctaaaatactggttgtcggcaacaaccccgaccgtcagaacatctattcggcggcactggggctgtataattcccgtatcgtgaagctgataaacaagaaagggcagcttaaaagttcggtgataatagatgaactaccgaccatatattttcgtgggcttgacaatctgattgcaaccgcccgaagcaacaaggtagcggttctgctgggctttcaggattacagccagctaacccgtgactacggggacaaggaaagccgggtgatacaaaatactgtgggtaacgtgtttagcggtcaggtagtcggcgaaacggcaaaaatcctatcggagcgtttcggaaaggtgttgcagaaacggcagagcatgacgataaaccagcgggagaaatccacctcaataagcacccaaatggacagcctgatacccgccagcaaaatatccaacctcacgcaaggcatgttcgtgggtgctgtggcggacaacttcgatgaacggatagaacagaagattttccactgtgaaatcgtggtggacaatgaaaaggtgaagcgggaaaccgcccgttacgtgaagttgccgcagataatcgacttcacggacaaggacggcaacgaccggatgcaggaggaaatacaagccaactacgaccgcatccggcaggaagtccggcagattgtcgaggacgagataacccggattaagaacgacccggagctatgccatttgattagggaggaagaatagctatatataaaatgtataagaacacaaaagccgtagcacaaatctacggcttttgttattattatcgttctatcagcaattctatcttttgggctatttcttccgatgtcggtaatagttttttgtaggcttcaggtaattcagaagaaaggctgtaggttgccaccccgataggcatattggaacttttcaaagcatactccactatcatgcggcttttggacttgcaaatgataataccgatagccggattttcatgtggtagttttaccgtatcattcaaaatattcagatagaattccattttgcctttatactccggctggaactctccgatttttagttctatggctatcatggcttgcaaacgtctgttgtacagcagcaagtctatgaagtattcttttccgtccacttccagccgatattggttgcctatgaatgaaaaatcagtaccgaactccataaggaacgcacggatattcttaataatagcctgttccagttcatattccgaatgttcctctgcaagccctacaaggtcaaatgtatattcatcttttaatgcaagtatagcttggttctttattttatcaggcagggtattgtcaaaattgctttgcccaagtaaatagttctcgtaagttttggcttctatcttattgataagaacgtcttttgtccaaccgtatttttgggtagccaatatataaaattgccgttgtcgtgtttccttgcacttcgtcagaatgactatatgtttcgaccagctaatttctccaactaatggttggagaatttcattggactggtattcagcataaaaacgtgccatgtcccacatattggaaactccaaatccttttatccccggaaactctttctgtatgtcccgtgaaaggttttccacaacggattttccccaacctaatgctgtctgttgctcggtaatccgtttaccgacttcccagtataaggctatcatttccttgtttacagcctttaatgcttcatactgggcagacctgatacgggcggttatctcatttttgaaattgagatattcgggggataatatagaattgtttttctctgtcatattctgtatgtatgataactgattgcaaagttatgtttttctttggattaagtaatggactgcttctgttttatcgcttcttttttcatcctacccggacaaatcgggacagcgcaggacaaatgcggacactcctttctgcctatccaaatatagcatatttagtcgctacctttgggtgggactattcccgtaaccactaaaattccaattatttatggcaaacagaatgaccccgcccacagaggggcaggaaaaagacgtgctgctggtcttggataaacagcagggcaaggtgagtgctgttaaaagcttcgacaaggacggcaatttgcagaccgtatcgccgacgcatggcggcgagttcatgcaggtggacaagaacagcgatgtgttcagcaacttcatttccaattttttccgcaagtttcaggacacttccgggctggaactgttcagcgtaaaggcttccgaagcggaacaacaggcaagggcaatcgaggacaatcaccgcaacccgacaccggagggcagcaaacgaacagaaatgcttcgagttccgaagtccgactttcacgagttcaagcagggctaccgcttcgacccggcaaaaatcgactgggagaacctgaaaaaagtcggcatcaccgccgacaccctgaaaaacacgaaagacttcgaccgggtgatgcgtggctacaagtcccgcaacatctacaccgtttcggggacggtaggcggcttttacctcaaacctaccgatgtcaagctctctttctatcaggcaaaggacggtacggtagtacccaagctgcatggcgtacagcaggatgaaaagctgttgcaacgcccgttccatgaacacgacttcaccaagcaggaacagggcaacttgcagggtactggcaacttgggcggcatcgcacaaatcaaagacccgaaaagcggcgaacaaatccccgtgttcgtcagccgggacaggtacacgcacgaactggaatacatgcgggcagacaaatggaaatgccccgatacaatctgtaacgtgaaagtcagcccggaacagaaagccgcctttgaagccgggcaagcggtcaaaatggaaaacctgcaattcagggacggcacgaagcgcagtgcctatctacaggtcagcgcagtggagcgtggcttggagttcctgccccgtgccgccgtccagttcttacagcagggacagcagcaagtagccgggctaaaggacgggcagggcgttgagttcaacggtcatgtgcagtccggcgcacagggcaaatcccccgacaaggtgcagccgaaagacgttacccccgctgccgagagccggacacaggtagcggtcaatacagagggcaagaccaacgaagccaccaagcagggcaaagagccgttgaaacaggggcagcagaagcctaccgccaagcagaaagagaagcaggacaaggcgcaagacaagagcctgaaagcggacaagcccaagaagtccaaaggaatgaaaatgtagtacccacccttaaaaagtaaagaattatgattgcattgatagcagaaaagcccagcgtggcaaaagacatcgcccgcatcatcggagcgacacagaagaatgacggttatctttccggcaatgggtatatggtgacatgggcgttcggccacttaatccagcttgccatgccggaagcctacggcgtggcgaacttccgccgggagagcctgcccatactgccgcccgatttccagctaatcccccgtcaggtgaaagccgagaaaggctacaaggcagcccccggcgtgttgaaacagttgaaagtgattaaagaggtattcgaccagtgcgacaagattattgtagcaaccgatgccggacgtgagggcgaattgatacaccgttacatctataactatttaggctgtaccaagccctttgtacgcctgtggataagcagccttaccgacagggcaatccgtgaggggctggacaacttgcagccgggagagcgttacgataacctctacctttctgccaagtcccgcagcgaagccgactggctgatagggataaacgccacccaagcgttgagcgtggcagccgggcagggcgtgttctcactgggtagggtgcagacacccacgctcgtgatgatatgcaaccgctatttggaaaacaagaactttgtcccgaccaagttttggcaactcaaagccgataccgccagcggtagaatcagtttcaccgcccaatctaccgccaagtgggagcagcaacccgaagccatagccgccctgcaacgggtaaaggatgccgggcagcttgcggtgaagtccgttgaaaggaaagaaaccagccaagaaccgccccttttgtatgaccttaccacgctacaaaaggaagcgaacacgaaactgaacttttcggcggacaagaccctttccatagcgcaaagcctgtacgaaaagaaagtgatgtcatacccccgaaccgggagccgctatatcccggaggacgtttttgatgaaatgccggaacgtgtcgccctgctggagcaatacccccgctttgccggatatgccgccggattgaacggcgtaacgctgaaccgccgtagtgtgaatgacggcaaagtgaccgaccaccacgccttaatcgtgactgaaaacctgcccggtgaactctccaaagacgaacgggcggtttacgaactggtagccgggcgtatgctggaagccttttcgggcaggagcgtgaaagacgtaaccaccgctgtgctatctgccggagatactgacttcacggtgaaagggtcggtgatgaaagaagctgggtggcgtgccgtgttcggcgagcaggaaacgggagaggatgaagaaaccgccagcctgccgccactccaaaagggcgaaaacctgcctatttccaacgtggaactgttggagaaacagaccaagccgaaaccgctgcacacggaaagcagcctgcttgctgcaatggaaaacgcaggcaaggaactggaggatgccgaactgaaagccagcttgaaagatgccgggataggtacacccgccacccgtgcggcgattatagaaacattgttcgcccgccagtatatcgtgcgtgagaagaagaaccttgtacccaccgacaaggggcttgccgtttacaggattgtcaaggacaagaagattgccgatgtcgaaatgacgggtatgtgggaaaccgccctttccaagatagaagcgggaaacatggatgccgacacgttccgaaagggtatcgaggtgtacgcagcgcaaatcacggcggaactgctttcggtacaattatctgttgcgggcagtgaaacctgtccctgccccaaatgcaataatgggcgcatcctgttctacccgaaagtggcgaagtgttccaacgtggactgtacgcttaccatattccgcaacaagtgcgacaagcagctttccgacaaacaaattgtcgagctggtgacgaaacgcaagaccgggctaatcaagggcttcaagggcaagaacggcaaggctttcgatgcttcgctggtactggacgaacagttcaatgtcaccttttcattccccgaaaagaaagcgaaaccgaagaaatagcctatctttgccactgaaatttcattgtaataggttttacgacttataataattgaaattttagtggttgcgcccggtgggaaccgggcgcattttttatacgctcccgccaaacaggtaggtcgaacagaccaccccgttatccagcaccctgctttccgagagcttccacagcgagccgaaggtttctccgataaagccgatgcctttgcctaccatgaccgggacagtgtagatagtcaggctatccaacaatccggcttttatcagcgaagtaagcagtttgccgccgcccaccaccagcatatcggtttcctgtttcagctcataaatcctttgcagcggttcttcggtcaggaactccacgccgcagtctggtgttacgttggtgtcgtagtgtgacaccacaaaagaccgtttgcttttgtgcggccacccgccccagtgttcaaagatgtagttataggtgttcgcccccattagcaagctatcaacaaccatataatgcttgccaatgatagtttttacttcatcgggtaaccaatccagttcttggtctaaagtggctgtatgcccgtcaagagatacggcgatgtgcgctttaatttgtttcatcttgttaggtattaaacagtttaataatccgcatttaactgtccaccaatatcctaaaaaagaagcgtgaccttacactgcttcaaagcgaggtactggcatacccaaatgaggaaacaggcaagaccacgctatgataaaacatagcatatcctgcgctgaatatcccctcattttgaaaagtgccagttttcgctttgggacgttcggcgaacgtatatgttatatataaagacgaaatcacaaccgaggctgttcaatcgccgttattttcttatgttacttttgcaaaagtagtaaaaatcactggaataaccttgtaaatagtagaaatcctgccgtgttatcacaacagggcaggacacaagcacctaaaattacacaagacccatacgcctacgggcggcttgtgttccattgaagattatatgaaccgatgacaaaacagctttggttcgccgtgtctttggtgatgatgtccctttcccgcatgaagcggatatagctctttgcggtacgttccttgatgtccaagacctgctgcaactgctcgcaaaggtctatgtaggtaatgcgtgtctgccgcccgaagatgtcccgtgcgacattcaccagttctctttccttgcgcttctccttttccttacggggcttctcacccttgtacacgtgcatccctgtttccttgtcccatgcaaagagcatcaacggcacgtccagcgggcttccgtcccttactttcagggctttcacgactgactgggtgggttcatcgtctttctctatcgaaaggattgtagccgccttacgttgcagttcgctacccaaatgcccacgtaactttaatccgttagggacgaagtgcagcacacaaagaatacacgtgttatagatgcccgccagccgatagagttcatctatcaccgccacactttccgtttcatcgttggcactctttacaaggtcagcgatgccgtcaatgacgaccaactggatgccgccgtactggtagtagaacttatccatgctctgcacaatggcgttcaggcgttctttgcgtgacatacccgtcaggcagaacgctttcagttcatcgggtttgtccggctgtttggctcgtgtcagcaggttgcttacattcttgaacagttgcacttccgactgttctgtgtcatagagcaagaccgccttgtgcctgccgttggcggttatctgtattcccagcgtatctacttccgcaccagccgggcagatgcagcccgccacgattgcggctacataattgctcttgcccgttccctcgcccccggtgatgccgaacaggttgccttgtgttcctaacggaacatcacccgccgaaataatctcttgcgctttggcgggcgggttgttgaaatctatctcgcacgattttagcataatcaatgtgtcgctatacaggttgtctaaaaattcgataaacagtttcaggaaatcttcacgggtgttcccggctttgaagtagtcggaaatgtccttttcctctttcgtacccggaagcggcaggagcaggcgtttcactccaaattcttccaacagtttttcctgcttgcatgaactttccctgcctgtcttgtccatgtcaaagagcaggacgatgtgcttgaatcggaatgtcagccgatataccagcgtgggcggtatagtcaccgtttcgctgttgaagcagatagcgtgaaaaccgtgtgccgccagcgaaagcacgtctttctcgccgcccgtgataaagagcgtgtcgccttttgctggcagttgctccagcccgaagcagtagttttcgccgaagctgccgccatagaggaagcggggcgtggagaacgggcggtacagcttgatatgctgtttgcccttgtagccgtacatgggttctgccaccgatgaagtgtaggtgtacggtttgccctctgccgtttcgctgttgtactcccggagcgagcaaaccttgtaacgttccagcagttctggcgtgatgccgtactgttgccagtacaccagttcggcaagcggaaacttctgttcccggaactggtagggcttgacgggcttttcgggtgtttcttcggttttgcccgatactgtccggtggacggttgccggaggaatggaaacaggagtgccggaagccagccccaagcctaaatcccggtcgatgatttccagtatctccacgaagtcagccgcccggttgcagtccagcccctttaactgccccacgaggaagaaacagtcgccgctgtaactgtcgttgccgaagtctttcatcttgtagatgctgctccggcggtcgaagtagatgttgcaggaagccttgctgtcctcgtacagcgggttaaggaagttgcgacctatgcgccagtttccgggcaggtagtgtttgaatatcgccagcccgttacttgttctttctaagatttcctctttccttagcatacagttggtggttggttatcaggttgtcgatgttctctttgttgctccttatcaggcgttcttccagcatccggcgtatctcgctgaccttgtagaaatagcgtcccctgatgttggaataggcgatagtacccgacacccgcaggcgttgtagggtcttttcgcttattttcagaaacgtgcagacctcatagctgtccacccacatatcttcttcactttgctttgccatttccgcatgattgaagatgtaatcggcaatagcggtaatcttgttgtccagttccttataggctttggactcgaatgttattatttccataatggtaactaattgatttgccgcaaaattgcatctttctgtaagataaaaaatacaaggttctaccaacttggttgaaatttttttcagggtgattttaggggtgaaaaatagtttttattcctattcatgtgctccatttgtataaaaagaaaaactaccacgttggtagtaacttggtagtttttcaatcagctaaagtacttatttacaaatcatcatccatgcgcttttgcagttgctccattatgaatgtgaaaaaagccgttcggtctttcttccggtttttaaggctaagatatgttcggtaatagtcgcccagctctatgtcaaaggcagtttcgacaaatgccataacctcttttattgtagcgttgccataattcagcgttttagcggcaaacaatccatatccccattctatcgcttccgattttgtgccagtccatttcagtttgaagtccgacaatgatatttttatatcgtttgtcagttgctttttctctaataactgtaatcgctgatttaggtaaatacgcaacatttcattggctaatatcttggctaccgtatagtcgtaccctgttgaaaaattcgggtctttatcgaattgtgcgctatcagcgcatagccgaatatctgccttccctcgtacaaagtagtatttatcatacatggtagagtgtgaacgataatactggtaaaagtccaaattccgattgaagaaataggtcagattatccagttctgcgataagatgctttctgataacttcgttactcccattaggacattgcatttctatacgacatattttgtggaaatagagaagccgccccaatagttccggtttttgaactttgaaaaagcgtatttcatcctcttgtgtggggaaagtgtaggtttgcaattcatttcttaacccagtgatgatactttgtaagtgacgtactattgaaagagaggtttcgataatatcattgccgtagaggtcgattttagcaatctctacatctatttccgataggagtttatcaaaatcttctttcattttattgaataaccttattctatttcttctctttttgtaactccttaaagatacgttccaaatcatatccatgcggattggaaatttggaaatgtccgctttctaaggggatattaatcagaggggcagttatcactgtgtcattgaaaacgaaagcgatacgctttcctatactcttttttgtggcttctctccatataggcgatttattttggaggaagacaccggtaatgaccgagtgtccaaaagcatcagtttccaaacgtaaagtatcgaaatccttaacagtaaggaaaggtgttagtgaaaggctgtctgtagtctgtgatgttacgtagtaccagccgtttatccggtgaaaagattttgtctgcatacaagctgtcattagtaggcagaaaaagagaattgttgaaatcttcatatccgctatttttaggttaatacatcttctccaatgtccacaccatcttattgggattataggcttccattacgaggtgtgttcctgtgtattccagcaccgtccatggacctgctatgttgtcgaacgtgatgatttttccatttacttggtaagtaaaatctgtgttccacatatatccgtcttcttcgttcgttcttgtataaatgccttctgattcgttggtaaattgaagaatggattgttttgtgtagtctatctcatcttcgatattgtacacggtcatttgcgcttgccaagtagtttgcttcaaggcttcgggggtgaagacagaagtaggagcatcgtcgttactacaatttgtcagacataacatggcgcaaataataaatgtggaaagcaccatacataaagtaattttctttttcatcttatctcttttaaatgattggcaataattatatgtttctctccatagggatactaacaatacctttattaatctctttttcacccacttttttgaagcctaaagatgtataaaaagtttctgcataggttgaagaattaactgttatataagtaaaattacaattgctcatcatatagtcaaataacaatgttcctattcctcgccgatgatagtgcggcaagacaaagaagagggatatatgttgcctttcccgatgtacaccgattattcctatcaatagatgattgtcaaaagcaccatatatgtcaagcgtattcatcaacgatgtgtcatacacgaagcttttaaaggtttcaataccttcttgggtgaaatcattcctttccatgcatacttgataagataaatcggcagcattgttatattcttcttgtgttaatttacgtatcatatcaatattattaaatagtgaatgcaaaatacggaagaataaataaaaaaggtcttgacaattgtcaagaccctaatataaagtatgttaaaggataagttatttcttcagtttgcaacgtatacgactaacagtttccggtgtgacttgcaagaaagaggctatctcttttaacgtaatatattcttgaatgtcgggacatctgttcaataaatcaagataaagttcttccgtagttttacagtacatatccaataatctatgatacattaacgagtaggattgttcgacaagagcgcactttatttgtgctgtctcggcatttgtagcaaaaaaatcctctaactttgaatacggtagatagtaaatctttgaatcgcaaacagcttcaattgttactaatgacggttgattaggttctataagtgtacataaacttcctgcaaattcttcggagaaagtatatcctactatatgtacctcaaatccgcaactacgcgcctaatatgatacagaagcgaaaagaatctgcatcgttagtaaaaagggggcacagtgcatcgaatgtcaccataaagacatataaatgccccttaccccaccatgcgacttgaggcaatacgcaaaatcacgactataagttgtcggtgttatccaaagtcattctggaacacattggcataagcattgttgcatgaatagatattcagcacatacttccttgatgtcctgacccatttggctggcacagagatgaacttaaagacaaacgtcttgatgcggcttgttgctttgagtccgaacctcttcacgtcaagcctcgccatgatgaatttatagaagttgcgtatgagtgccataagcagaagaaacaccgtgttttctcccataaaggattttggaagcctgttccagccgaatccgttattcatatcatcgaagatgcgttccttccctccacggaggttatagaattcgacaatctctttctcggaagactcgtagtcatttgtaaggatgcagcggtaggtgtattctccttcccacaggtcgagttcgccgtctatccgcttctgtctttgaatcacaagacggtatgccttccctttccatttctcgatgagaatggaggccagctcaaactcaatgccgcccaattccactttcttccaacctctgagggcaaagatgtcattgtagagcgaactgcatcggttagcacggatatagaaggtcttgcagtgtttagcaatctcttccactatctcttcagaacacgagccgcaatcagctctgaaacggttgataataagcttgttttgttcaaacctttcaaagaacctcttcagcgtgtccttctggtggaaacggacatttgtgttgccgtcgctgttctcaatgccgacaatcaagttgccaataaccgccacgccagggcgataaccaaggaacttcttgtatgtaggcttcgcatcaaacttctcagcctctatgaactggtggtcgaagtcaacgtcatacccctcgccctctttcagctgccctgtggacaataggcaattgaggagcagtgtattcagcttgtctgccgtgttgaagtcgtaggtcttgccagtgtcggatgtgtaggaaatgttatcctgggtcagttcctttatggctctaagaatcgtgtcggcactgcatgtgcgaagtgtcggatgaagcgaaaggtggtacatcagatgagtggtgacatcctcgatgcatgagccgccacaaaaataaacgctcataagcgaacggatgatttcgctgtattgataaccatacagcctgcatctcataccgagggttgagtcgattacagatgagagtctggagtcaaattgctccattattgaaaatattcctccaaaaggagtgagtttctcggatttaattgctacctttgccatgtctgtcgggtttgatacatattttgatttgcaacactaagataggtgaaaaatctgacatggcaaattcctgagcaactttttgttgctcaggtacttaaaaagttatatttgtaatagtgttgcggaattaaggatgtatatttcctctttcatccacacgggtatatctcaataaaccgttttcaatataagccccccggcagttcattttaccttgaatagagaactgttcgccctttttgagttcaatataagtgccatgttccaaaaagaacagctttagctgttctaatttcgaatggttggcaaattgcaaattaaattgtttcatgttaaatcattcatttattgaaatcattagttcacacaaaattatagcaaattcgctaaatgacaaaatttttagtgcaaggtgcaagtatatatttatatatatagcttgcaccttgcactaatcgcagaagatttattatcaatgatttgcgtatttcaaaagaaagacttatctttgaacccgaaagttaggcagacaaacagcggtcaaagttggacaagcccaacgtctgaaaatcgttactgtttcgttacctatttgaaattttggaatataagacattgtagcataagtggttagagttataggttcaaaaacctgtctctccgcttcaattaatagataaatccctgtaaagtagtgctttacggggattttttattttgtgtatgtgaataagataagcataaaaaggggcggtttctgttgaaatagaaaataacactatttgaactgtttattttagaataaacactctttttttagtttgaatttatcggtttaaagaatattattccaaaatgcttattatcagttaaatatctgtttttatctactgtcagatttcagtttttatatctacctttgttcttattgtacgagatttgatagttataatattaatgaatagaatgatgaaaaaacagacccaagcgattcatacgcagttccaaagaagagatgcttacaattctctcagtatgccggtttaccatacagcggcttatgaatttgacaatgccgatgacatggctgatgctttttgcgggcggacagatgctccggattactccagagtgatgaatcccacagtgactttttttgagaataaggtgaaggaacttacgggggcagcagaagtcatagccctcaattccggtatggcggctattagtaatacattattttcaattgcagctgcaggaaagaatatagttacatcgcgtcatttgtttggtaatacttattcgtttattgctggtacattgtcccgcttcggggtggaacctagattgtgtgatttgacagacattggagcagtagagaaagcagtagacagtaatacctgctgcatttatatggagattatcaccaatccgcagatggaagtggcggatttacaggcgctctcacggatagttcatgaaaggggaattcctctcatcgttgatactacgcttattcctttcacagaattcgattcacatagcttaggggtagatattgaagtggtttccagtaccaaatatttatcagggggagccacttccattggtggtttagtaattgattatggtacatgtccgggattcggtaaacgtatgcgtacagagatgttactcaatctgggagcttatatgactcctcatgtggcctatatgcatactatcggattggaaacattggacgcgcgatatcggatacagtctgccaatgccgctatgttggctggtaagcttcgcatattatctgctgtcaaacgtgtgaattatgtggggctgaaggataatccatactatgctttggcacaaagacagtttggtccgactgccggtgctatgattacgatagacctggaaagtaaagaggcatgctttgctttcatcaaccgactgaaattgatacgtcgcgctactaacttgtttgacaataagacgcttgctattcatcctgcaagtactatttttggaccgtttactgataaacagcgacaggacatggatgtgttggatacgactatccgtttctcaattggtttggaggatgtggatgatctgtttgacgatgtcagacaggctttggataataaaaaggattagaagcaaaaatccaaaagtcatatacgaaactgtaaatataccgcaaatatggtatataaaatgccattcatacgggatttatcagtttgtatatatctaatacctttgccccatcattttaacagtaaacaataatgggtaaaaggattcatttatttttgcttgctcttgcaataggagtgatacaaggggcagcacaggtgacaacagtgcggggcatcgtcaccacagaagaagatggggagccggttatcggtgcctcagttatagtaaaaggaactgcattgggtaccgtaactgatgtcaacgggagatttgaactgagtggactcccgccatcagccacccggctgctaatctcttacattagtctgatggcaaaagaggtagctattgcaccacaggtatcggtaacactgaagagtgatacgcatctgctggatgaggtagtagtaacggctttgggtatttcacgcgagaaaaaggcattgggctatacggcacaggaagtaaaacagaatgctttggtgcaagggaaagataataatctgttaaattcgttgagtggtaagatagccggtgtgcgtattaccaatacacaaggagatgttggttccagtcgcattgttattcgtggtgaaacttctattgcaggtgagaatcaaccgctttttattgtggatggaatcccagtggataattcgcagcttaatgcacgttccagcggacgcgattttaaaaatgcaatagcagacctgaatccggaagacataaaaacacttactgtattgaaaggtccgaatgccgctgccctttatggtgcgcgtgctgctcacggtgctattgtcatcactactaagggaggagacaaaaggcagaaagggatagggattacattacattcttccacgcaagtctcttttgttgctaccttgccggagtttcaaaatctttttggacaaggggcagggggacggttcagctatgtagatggcaagggtgcaggtgtgaatgacggggtagacgaaagctgggggccacgtcttgatattggtttgttgattcctcagttcgatagcccattggacgctgacggtaatcgtgtggctactccttgggtatcccatcccaacaatgtacgcgattattttcgcatgggtatttctacaaacaacggtatttctattgcccgtggagacgacaaataccagttccgtgtaggatataactacgaaaaacaagtcagtatcgttcctgatgctggaactaataagacgaatatcagcttaaatacggattaccatctggcaaaatggattgtggtgggagctacggccaattacatcgtttatacagctcccagtttaccggggtcagctaccccctcgggcagtaacgtacgttctaacagtcctatgcttcagttcttgtggttcggacgtcaagtggatacgaactcattgaaggcggactatactcgcaactggaattcaagctattacgacaatcctttttggagtgcttcttataatacacagagtcaggaacgtcatcgtctgataggtgatctgcatgccgaattccgtctgacagatgggttgaatgtgcgtttccgtactagtaccgactggtataatgaccggaggaaatccaaagtaaaatgggggagtgcaggtgccggttcgccttacggcagttatgctgaagatgcctatacggtgaaagagaataacacagaagtattggcgacttatatcaaacagttgaataaaaattggggaattgacgctcttctgggttttaatgtacgtaacaaacaatatgagaataattatcaggctgctccccgtttggcggttgctgatctttatacattgactaactcgcgtgatccgctcacttcgtccaatgatttctaccgtttacggcaatatggtctttacggttccatacaactggattaccgtcgttgggctttcttgaatataacaggacggaacgattggtcgtctacactacctgtggacaacaattcttatttctatccttcggtgacggctagtgtgttgctttctgaagctttcgggtggagaagtaaagctgttaactacctaaaaatacgtggaggatggtctcaagtgggagcagatgccaatccttatcaattggcaacggtctttacttcagaaacagctttcaatgggaatccacttcaaagttcttctaccattggtatgaattcgaatctaaaaccggagaatacgtcatctatagaagctggtttcgaggcggctttttgggacaatcgcctatacttggatttcacttactataagaccgatagtcgtaatcaaatattgaaactagctactactgctgccagtgggtacacgtcgcaggtgcgtaatgccggacatatccgtaatcgtggctatgaaatacaattgggcgctgttcctatacaaacatcgaaagggtttcgttggaatctggatttgaattatggtgccaacagcagcaaggttgtcaaattggatgatgaaggtttgattacgagttaccagctctactcgtctggtattcagatactggcttcagtgggcgaagcttatggaaccctgttcggcacttcatacgtgcgtgatgctaatggaaacgttgtggtggatgctaacggtctgcctaagatttcgaccactaataaaacgttggggaagtttacgcccgactggacaggcggtatcagtaacactttcagttatcgttcgttaagtctttcttttctgatagatgcaagtgtaggtggttctattttttccaacactaataaaactggaaaatataccggtgtattagctaacacattatcgggccgggatgccgagcacggtggcttgtggtattatactgacgccatgggtaacaatgtacgattatcagaatctccttcttattccgtatcctccgatggactttactatgcccaggtcaatgggcaatccacccgtgtgtatcaggatggcattatggtagaaggagtgacggaaagtggttctaagaacgaagaggttgtatctgctgagaaatactaccatcgtatttatagtattgctgaagctaatgtatatgatgcttcttacgtgaaactgcgagaagtcgctttgagttaccgtctacctcgcttgtggacgcagaaactgcatttgcaagaagcttccgttacactgacgggacgtaacttgtggactatttataagagcgtccctaatatagatcctgaatcggctttgactactggaaatgcacaaggagtagaagcctattcattgcctacaacacgttcctttggtgtgaacctttccgtgaaattctaaatgtgaacctttaaataataggataagatgaaaagaagaatatattttttatatataatatgggtacaagtggttgccatttccctatcatcgtgtgatgatgaattgactgatatcaaccgcaaccccaatgccactgaaaatccacagccggcttatttacttgccgctgcacagtatcatgccgccaatctttattggggaagtagtacgaactataattcgactctgttgtgggtgcaacattgggctaaaatacaatatacagagccagattgctataatgtggataatggtagctttaccactacgtgggacaccggctatgcaacgctaataactgatttgaatgctattatcagttcggaactcggaaatgataattatcgagggatagctacagtgtggcgttcgtgggtttacctgttgctgaccaatctgtatggaaatataccatacagtgaatatgcacaaagtgtaacaccctcttatgattcgcaagagactgttttgcgcgggcttttggaggagttgattgctgctgaccagttgctttctaccacaggaggaacggtagaaggggatttgatttacggaaatgatattacccgctggaaacaattggcccactccctacggctacgtatcgcccttgaattagctgaccgggatgaggatacagcgcgtcgggttattgcttccctttgggataatcgtaacagtgtaatagatagcaatgatgctatagcccgttttgtttttacttcttcaccacaatggaatccatgggcatctgctttcaattcacgtgatgatcagcgggtatcaaaaacgttgattgataaactgaatgaatggaatgatccgagaattggaattttagcccagctacctcaagacgaaagtgtgaaaaactatgtaggagctgccaattccttatctgcttatgccgctaataatcagggatttaataaagtttcccgtcccggtacttattttttgaaagatagctctccggctgtattttatacgtatgccgaggtcttgtttatctttgcagaatccgctgcacgcggctggataacggctgatgcggaaacgctctaccgcgaagctattactgcttcattgaatcagtttggcattatagacaatcgtataatcgattcctatttacagcaggaggcaattcggttcgacgccgcacattggtatgaatctatcggctggcagaagtggatcgcttattatggacagggacccgatgctttcactgactggcgcaggctcggttatccccagcttatccctggtcccgattccgttttgggttccggagagttacctcgtcgctttttttatcccgtaacggaacaatcactgaatggtaagcagtatcagattgccatatcccatcagggagcagatgagattactacccgtttgtggtttgatgtagctaataaagaacgatgatacctccgtgtctccgggctgcaatatgcgtttgaaaaatatccgttgaatttaaaaatcagaataacaatgaacactgacattacatttatcatagcagataatcaggatataaccagaatgggaatgcatggatatatttccgctatattcagtggatgtcgcatgatagatgtgacagacaagaaagagctcatgcttgcattggtagaatgtaatgacagtgtcgttatacttgactatacactgtttgacatcaatggtatagaagagtttcttattatagaaaaacgttttccgagagttcgttggatattgttttccaatgaattgagcgaagactttattcgtaggatgagtatagaaaggaatattggtatgattttgaaagagaactccggtgaggaaattcattctgcattgatgtgtacagcacacggggaacgatttctttgtcatcagataaccaatttattgataatcggttccgacaaaccggaaattcattctgttttgactgttacagagattgacattcttaaattgatagcacatgggaaatccgtgaaagaaatagcattggaaagaacctcaagcattcatactattatcacccacaaaaagaatattttccggaagttgggtgtgaataatgtatatgaagcaactaagtatactttacgcgccgggctgattgaaatggtagaatattatatatgatattcagaagagtgttaggataagagttaagaagaatttgtaggcaggaaaattctctgtatctttgcccgcatggcaaaaaaaggtgagttacatataagaaataagcacaatggtcagtatgattttccattgttgatggaaaattatcctccattaaagagattcgtatcgctcaatcccctcggaatacaaactataaacttttttaatccgcaagcggtgaaggctttgaacaaagcattattggtaacttattatggcatccggtattgggacataccgaagcaatatttgtgtccgcctattcccggaagggcggattacattcattatattgccgatcttatccagccgaacggaacaacaccggatttaccggcaggagatgctaatggacagaagtctaaatgtagatgtctggatattggggtaggtgcaaattgcatttatccgatcataggacacactgaatatggatggaccttcgttggtactgatattgatccggtttcgatagaaaatgcacgaaagatagtgacttgcaaccctgtgttggctcataagattgacttgcgacttcagaaagatagtaagaagattttcgatggaattattatgcctgacgagtattttgatgtgacaatatgcaatcctccgtttcatagttcgcgtgaagaggcggaagacggaacgttacgcaaattaagcagtctgaaaggtacgaagataaataaagtgcagctaaatttcggcgggagtgcgaatgaactttggtgcgagggcggagaagttcgtttcttattgaatatgatttccgagagccaaaaatatcagaagaactgcggatggtttacgagtttggtttctaaagaaaaaaatctggaaaagttatataccaaattaaaatcggtgaatgtgtccgaatataaagttattcgaatgcagcagggaactaaaagtagcaggatattagcttggcgatttgctactaactcataacaatgagtgaatatcgaactgttatttgtttaacctattaattaaatagaatattatggaaaccaattacatcactttgacaaaggagaatattgcaaacgaacatatatgctgtgctttctcagataagaaatgcaaggatagttatgaactcaaaaaagaatggctgaagaaagagttcgataacggctatgtgttcagacgtattgatgaacgggcaaaagtgtttatcgaatacggtcctgctgaaaaagcatgggttccggtgaatgctcccaattatctgatgataaactgtttctgggtgtcaggtaaatataaaggttgcggacatggtaaggcattattgcagtctgccattgatgatgcaaaattgcaggggaaagatgggcttgtcacagtggtgggcacttctaaatttcattttatgagtgacacgaaatggctgttgcgacaaggtttccaaacaatagaaaaactcccttacggattcagccttttaagtttgaaactaaacccggctgctcctgatccttcttttaatgattgcgtgttgagcggtgagtgtccggataaggatggaatagtcgtttattatacccatcgctgcccgtttacggagtttcacgttcgcggttctttggtcagtgctgctaagagcaaagacattccattgagaataattgaattggaaagtatggaacaggcgcaaaatgcacctactccggctaccatatttactcttttttataatggcaagtttgtaacgactgacttaagtgtatgccttgaagggcgattgagcaaagcattgggctgtgattcaggagaatagctgacttggaaccatgttacgtctctgatatgtttagctaatgtttcttatttttattttgcaaatttaaattgtgtctgcacattttttggaaaatacatacctttggataattaatgattaaacacgattaagagttttatgcgtttttgggtatgtatttttgtgcttctatttgtacacaatcaattttcaagggctgataaaattataaataatgactctttgtatacagaaaaatatatcagagatatttatatttccaaccccaaacgtgctttacagttgttggatgaggccgaaaccagaaaagccttccctctgcgtctgattaatgaattgcgcagtttgtcatatcgtaatatgtatatgaataaactagcttttatgtatgcaaggaagtcgtacttgcttgattccatctctcaaagagaacctaagcacatgttgaagatgacggtttatttagctgaactttcatccataatgagtaaatataatgagagcatgcattatgctcttagtggaattatgcaggctcaaaaactgaaggacagagaggcggaagctagattgcttttttgcataggagagaataattggaggctgtcattgaaagatgaggcgtataattattttggtcgtacgattgaattactgcgtgggtcaaaggatatgagagaaatgatgctgctttcctattattatggagcagagatgggatttttaatgacagattcccgtattgatgaagctttggctcttgcttatgaacgtgaaaaacttcttaaaaaattagagaaagtaccggaggttcccgaaggctacattgatggtcaatatagctatttatatgcaaatttggcctatatttcttatttagaaaagaaatatgcgcaagcagaaggatattatcaaaaatatctggcaataaaagaatctcatactccggatggcaagatgtattcgattccttatttgattctttccaaacaatatgagacagtaatagacaactgtaaggactttaaagaattgttgagaacacagcgggataccttgaacgctcaatatttaactatacttaataaggaagtccaggcatatctggggctgaatcgttataaagaagccgcagaaatacgtgaaaccatcattgcaataacggatagcattaacagtaccgacaggaaaaatgctgcattagaattgaacgcgatgtacggtgcttccgaaaaagaagaatacatcgccgagcaagcctcacagctaaaaataaggaatgtttcactctgctttttggcgtgtattgtagtgctgaccctgtttatactttggcgtttgtggcgtttcaaccatataatcgagtataaaaacaggatgcttgccaaactgataaacgagaaatttgccaataaaaaagatggtaatcagttattggaagtgtacgaggaacaggaggtttcatcagaattggaaccggaattgatttctcctgaagaacaggatgaacttttggacgaaacagacaaagaaagtggggaagaagaggagaacaagaaaatattccaggaattaaatcatacagtcgttcaaaaacagctatatctttctccagagctctcaagagaagatttggcgcagattgtacatctgaataatgcacgctttgcccggatgataagagaatgcaccggaactaatttcaatgggtacatcaacggactgcgcattaattatgcgatcaagctaatgaaaaaatatcctaactataccatacgtgccatcgctgatgaatccggatttaatagtgccccgatattatataacctttttaagaaaaagacgggaatgactccttatgaatttaaaaaagcgcaggacacattgaggaattaaatagttctactaaacaattttcgtttttcccggtttatctattgataactaaatattaatggaaatgatacaggtaaggataaagagggtttacgaagatttttcagaaacagatggataccgggtgttggtagataaattatggccacgcggaatgaagaaagaatggttgaaatacgattattgggcaaaagacataacaccatcccctacattacgtaaatggtttcatgaagatattcccggacattggggagattttgtcacgcagtatcaaaaagagctggatgcttctccatcaatggctgattttctgactcttatcaaaccacatccggtgataacactactttatgcttcaaaagaaccggtgtataatcacgcccgaattcttcgcgattatctggaaatgcgtttgagagagtgaaattaaagtaattttatctgtttacgctttctgtcgttcactcaatttcctacctttgtaatctaaatcaaaatcgtgtaatcatgaagtataaattattggttcttgatgtagacggaacactcctcaatgatgcgaaagaaattagtaaacgtacattggctgccctgttgaaggttcagcaaatgggagtacgtatcgtattggcatccggcagaccgacttatggcttaatgccactagctaagatgctcgaacttggaaactatggaggttttatcctttcctataatggctgtcagattatcaatgcacaaaacggagaaattctgtttgaacgtcggattaatcccgaaatgttgccgtatctggaaaagaaagcccgtaaaaacggttttgctttattcacttatcatgatgatacgatcataacggattctcctgaaaatgaacatatccaaaatgaagcccggttgaatgacctgcaaataatcaaagaagaagaattttctgctgccgttgattttgctccttgtaagtgtatgctggtgagcgatgacgaagaagcattgcttggtttggaagatcactggaagagacgactgaatggggcgttggacgtattccgttcggagccctattttctggaagtagttccctgcgccatcgacaaagccaattctttgggtgctttgctggaggtgctaggtatgaagcgtgaggaagtgattgctgtgggcgacggtgtgtgtgacgtaacaatgattcaattggcggggctgggcatagctatgggacattcacaagactcggtgaaagcctgtgccgattatgtgactgcttcgaatgaggaagacggagtggccgttgcagtggagaaggctatcatatccgaagtgcgtgcagccgaaattccccttgaccaactgaatgcgcaggcacgccacgcattgatgggaaacttgggaattcaatatacctatgccgacgaagaccgtgtggaagcaacaatgccggtagaccatcgtacccgtcagccttttggcattttgcatggcggggctactcttgcattggcggaaacagttgccggactcggttcaatgattctttgccagccggacgagattgtagtaggaatgcaggtcagtggaaaccacatatcttctgcacatgaaggagatacagtgcgtgcagtaggaacagttgtacataagggacgttcctcccatgtatggaatgtagacgtgtttacttcaacaaacaaactagtgtcttccatacgggtagtcaacagtgtgatgaaaaagagatgaccgacgaagaaataagtaatttgacaactattgatgcatttattcagcggaagcagccgtttgctgtttaccgtattcccggggagaaagttccccgtctgttgacacaggcggaaggagtggtacgtctgatatacgatctgaaagaactgaatggacagagaggatttgtcatcgctccgtttcaggtgagtgagacgtgtcctgtcgtattgattcaacccgatcagtgggggcaacctttgccgattgacaatgatacggcagaagaacgggaagtcgctttgcggatgcaaggacaagaatcgttcctgacttcttctacggaggaatatgcctcctgctttcatacctttataaatgctttgcgtgataatacttttgataaattagtactttcacgtcatcttactattgataaagtatccggtttttctcctttatccatatttcgtgcagcgtgcaggcgttatattcattcatatatatacttgtgctacactccgcagacaggtatctggctgggaagcactcctgaaatcattttatcaggtgaaaaagatgaatggaatacggtagcgttggccgggacacagcctttgcaagatggtaaactgccccaaatatgggatgaaaagaatcggaaagagcaggattatgttgcttcttacattcgtcgccaactcctttcgttgggcattcattctacggagaacgggccttatccggcttatgcaggtgctttgtcacatttgaaaacagatttccgtttttctttgaaagataacaaaggtttgggagatctcttgaaagtgttgcacccgacacctgccgtatgcggtttaccgaaagaagaagcctatcggtttatattgcagaacgaaggttacgaccgccgttattattccggttttatcggttggctggacccggaagggcgaactgacatctatgtgaatctgcgctgtatgcatattgaagatgaacaactgactctttatgccggcggtggactactggcttcttcggaattgaatgacgaatggctggaaacggaaaagaagttgcaaaccatcaaacggctgattgcaacgcctcctttaaaatcataaactactaataattatcatcatgtatacagacaagaagaacatactccagttggttgcgttgctcgaggcgcacgggattactaaggttgtgttgtgtccgggtagtcgtaatacgcccatcgtacatactttgtctaatcatccgaacttcacctgttatgcagtgacggatgaacggagtgccggttattttgccattggtcttgcgttgaatggtggtaagcctgctgctgtgtgctgcacttccggtactgcattattaaatcttcatccggctgtagccgaagcattttatcagaatgttcctttagttgtcatttcagcagaccgtcccgctgcctggatcggacagatggatggacagacagtgccgcaaccgggtgtgtttcaaacgctggtaaagaagtcggtcaatcttccggagattcatacggaagaagatgaatggtattgtaatcgcctggtgaatgaagccttgctggagacgaatcatcatggaaaagggccggtgcatatcaatgttcctgtttccgaaccgctgtttcaattcacggtagatgcacttcctgaagtacgtgtgataacccgttatcagggattgaacgtctatgaccgtgattataatgatctggtcgaccggatgaataaatatcagaagcgcatgattatcatcggccagatgaaccttatctacctgtttgaaaaaagatatatcaagttattatataaacattttgcctggttgacggaacatatcggcaatcagacagttcccggtattccggtaaagaatttcgatgcggcactttatgccatgcccgaagagaagataggccagatggtgcccgaattgctgattacttacggaggacatgtggtttccaaacgattgaagaagtttctccgtcagcatccgcctaaagaacattggcacgtatcgccggatggtgaggtggtcgatttgtacggctcattgactacagtgatcgagatggacccgtttgaatttctggagaagatcgccagcctgctggataaccggactcctgactatccccgtgtatgggagaattattgtaagattattcccgaaccggattttgcctattcggagatgttggctgtcggtacattattgaaagctttgccggagtcctgtgcattgcatctggcaaacagttcggtagttcgttatgcacaactatattcgattcctcctacaattgaagtttgttgcaatcggggaacaagtggtattgaaggatcgttgtctaccgctgtcggttatgcggcagcttccgacaaactgaatttcatagctatcggagatctaagtttcttctatgatatgaatgcgttgtggaatatcaacgtccgttccaacctgcgtatccttttattaaataacggaggaggagagattttccatactttaccgggattggatatgtcgggcacctcacataaatttattgcagcagttcataaaacgtcagccaaaggctgggcggaggaacgtggtttcctttatctgcaggcacaaaatgatgaagagctgactgaagcaatgaaaactttcacccagccggaaactatggaacaacctgtgctcctggaagtgtttaccaacaaaaacaaggatgcacgtatgttgaagaattattatcatcaattaaaacaaaaataaattatgccaacacaaagagagtggacaaccatcagagaatacgacgatattctttttgattattataatggaattgcccgtatcacaatcaaccgtgaacgttatcggaatgcatttaccccgactactactgccgaaatgagtgatgcattgcgcatttgccgtgaagaagcggatattgatgtgattgtaattaccggagccggtgataaggcattctgttcgggaggcgaccagaatgtgaaaggacgtggcggatatatcgggaaagacggtgtgcctcgtttgagcgtattggatgtacaaaagcaaattcgtagtattccgaaacctgtgattgctgccgtgaacggctttgccattggtggcggacatgtgctccatgtagtatgtgatttatccattgcttcggaaaatgccattttcggtcagacaggtcctcgcgtgggtagctttgatgccggattcggtgcatcttatctggcacgcgtggtagggcagaagaaagcacgtgaaatttggttcctttgccggaagtataatgcacaggaagcattggatatgggattggtgaataaggtagtacctttggaacaactggaagatgaatacgtgcagtgggcggaagaaatgatgttgcttagtccgttggctttgcgcatgattaaagcgggattgaatgccgaactggatggtcaggcaggtattcaggagttggcaggtgacgcaacattactttattacctgacggatgaagcacaggaaggcaagaatgcgttcttggagaaacgtaaaccgaacttcaaacaatatccgaaattcccttaaaaatgataggctaatgaaagactgattgtgcagtaattaacagattgaaaagatattcattatggattgtaagatagatattattccccggttgcttcatttcaagcaacccgcgggaacttcccggggaatatatactacccgaaaagtctggtatcttcactttacttctcctgactttccgggtagagtgggaattggagagtgcgcgcctttgcccgctttaagttgtgatgatctccctgattatgaagatatattaaaaagaatttgtcggcaagtagagaaagaacaaggaatgtgggataaggatgttttatgccaatatccttccatcttatttggtttggaaacggctatctggcatttctttgcagggagttgggctttgtccgatacggctttttcacgtggagaggtagggattccaatcaacggcctgatctggatgggagattttgatcacatgttatcccagatcgagaaaaagatggaagccggattccgttgtgtcaaactaaagattggtgctatcgattttgaaaaagaattggcgttgttacgtcatattcgtacccatttctcttctaaagaaatagagttgcgtgtagatgcaaacggtgctttctctccgggtgatgcaatggaaaaactgaaacgtctgtcagaatttgatttacattctatcgaacagccgatccgtgccggacaatgggaggaaatggcccggctcacttctgaatctccgttgccgattgcattggatgaagagctgataggatgcaacacgctggaagaaaaaaagaaactgctggcaaccatccgtccgcaatatatcatcattaaaccatctctccacggaggaatatgcggaggggatgaatggattatggaagcggaaaagcaacatatcggctggtggatcacttccgctttagagtccaacattggtttgaacgctatcgcccattggtgtgcaacattcaataatccgttaccacaaggattgggaacgggtatgctctttactgacaatatagaagtgcctcttgaaatcagaaaagattgcctgtggttttgtaaatgatggtatttagtggtatttaaaggatattctgatgatattcgatcgacaacaacagcgcttgctactggaaggaaaagaatacacttttgaagatataagccaactgatagcaggaggagcagaagctcattctcctgcttattgggatttatatcttttcctgaacgaatggtttaatggctctcctgtcatcacggttcatacatcgggctctacgggtatacctaaagaactgatggtacgcaaggatcaaatgatgcaaagtgcgcgtctgacttgtgaatttctgaatttgaagaaaggtgagtcggcattattatgtatgaatcttcgttatatcggtgcaatgatggtggtcgtacgttcattggttgcaggtttgaacctgattgttcgtcctgcttccggtcatccgttggcggatataaaagaatctttgagatttgtggcaatggtcccattgcaagtttataacacgttgcaggttcccgaagaaaaagagcgattaaaacaaacggatattctgattataggaggcggagccgttgatgaggctctggaaacggagataaaccatcttccgactgccgtttactccacttatggcatgactgaaactttgtcgcatattgcccttcgtcgtctgaacggagcatcggcttcagaacattattatccatttccttcagtaaaattgtctttatccgcagagaatacattaatcattgatgcccctttggtatgtgacgaaacattgcagaccaatgacattgcacgtatctatcccgatggaagttttatgattctaggccggaaagacaatgtgattaacagtggaggaattaagattcaagcagaggagatggagaagttgctccgcccgtttattcctgtgtcctttgtcattacttcagttccggatcagcgcttagggcaggctgtcactttattgatagtgggacaattggatacgagagagctagaaaataagttgcagacaacattggaaccatactatcgtcccaaacatatttttattacagaatctatcccacagacggaaaacggcaaaatagaccgggtcggctgccgcactttggcagcatcatacctttcccattcgcatcagttcccatccatagaactacatgatgatgcaatgtagttgaggtttccggtaaaactagtgaacttgtaaattgaggaggggtcgcatttacaacttgaattcagccccccagagtgatttggggttcttcgtcaaatttggtggtacttcttctattgtgaataaataatcttcgctctcagtagtttaattcctgccctattgtacatctgtctttttaccgctttaattttattcactgtcccctccagtaatccgttactgaaggggatatcaatagctgcctgtactgcctcccagtctttttcaataccatatgcaaagttcgtcagtgccatattccgtgttgccttcgctttttcaatccactttctaatatccttatcataagtgttcccattaatcatatctctgaaattctgacacacgcttaaaagttctttaatctgcggtgaggacttatacagttccgctagtttaggattatccgattctccctttagaatgtatttgcgtatctgattctgtgaaactctctgtattttacttctgttttcaatgctctcattatgctccttgacttccttcctcttttgttgatacctttttcgcaagctggatgttatccttccaataagtgcgccactgattttactccccattttttgtgccaatatttttcgagtaatacagcccgcactaatgattgtagccagttcggatacatgtttaagagctgtcttctgttgctcattcaagtatgcccctattcttctgttgtgaataatcttataaatgtagcgacttttcttacccaaatgtgtggctgtctgctcaatggtcatcccctgcatttttaagttcaagctttccctgtatatcttcaatttttctctgtgtcggacatctcccatgttaaatatgtcctgaagaattaacgaagaagccgtgtctctgtcaggatattcgtatttgagctttttcttggtctgacggattattttctctatttccggtatcatcgtgtccgtcatattcttgattagatggaatcggtcgcagatttgtgtaacaccaggaattattctgtttatagcctctgtgaaacatcttccacggtctctcgttatatattgtatttgaggattccggatgagccagttatcaagtgcttctccgtttctatcctctaacaaagcaataggtatgtgtgtcatctggtctacggccacactcatataatccttaccttttttataggcaaaatcatcaatacctacataaatacttttattatgcataggattgtgttgtccgcactgttgtaggatgcgtaagcaggaagaactactggctgttatatggaacagttgcaaaagagaagaggcctttcgggaagtaagttccaaacttatcgatctgatgcgttcctcaacaagatagctccgtctaccataccgacgagccagaaaagacaacggttcgcagaatattttttgtggacaagaaacattgtcacaataatatttgccaaccttgatgactaactccaaagtatgaccgtaaacttcaagatcctcaatatgacgggagtagtaactgtgcaatcggtgactgaaatgtccgcaataaggacaggaagcccctttgccagccgtatgtagaaagaccgtcaatgagccaacagcttcagagataccatcttgttgcagattatcgtagccaagactgaatctgaaatcatggaataatcccctatttgtaggagcattttctttttttgatgtatatttgtacgttgtagatatgacttgttgcattgtaactcttaatgatgtggtgtctttaaagttactaaaaagcaaacatatctacaacttttaataggattaagaaagaagaagacagttgaaataaaaaagagattaccaccaaatttgacgaagaaccagatttggggttcttcgtcaaatttggtggtacttcttctattgtgaataaataatcttcgctctcagtagtttaattcctgccctattgtacatctgtctttttaccgctttaattttattcactgtcccctccagtaatccgttactgaaggggatatcaatagctgcctgtactgcctcccagtctttttcaataccatatgcaaagttcgtcagtgccatattccgtgttgccttcgctttttcaatccactttctaatatccttatcataagtgttcccattaatcatatctctgaaattctgacacacgcttaaaagttctttaatctgcggtgaggacttatacagttccgctagtttaggattatccgattctccctttagaatgtatttgcgtatctgattctgtgaaactctctgtattttacttctgttttcaatgctctcattatgctccttgacttccttcctcttttgttgatacctttttcgcaagctggatgttatccttccaataagtgcgccactgattttactccccattttttgtgccaatatttttcgagtaatacagcccgcactaatgattgtagccagttcggatacatgtttaagagctgtcttctgttgctcattcaagtatgcccctattcttctgttgtgaataatcttataaatgtagcgacttttcttacccaaatgtgtggctgtctgctcaatggtcatcccctgcatttttaagttcaagctttccctgtatatcttcaatttttctctgtgtcggacatctcccatgttaaatatgtcctgaagaattaacgaagaagccgtgtctctgtcaggatattcgtatttgagctttttcttggtctgacggattattttctctatttccggtatcatcgtgtccgtcatattcttgattagatggaatcggtcgcagatttgtgtaacaccaggaattattctgtttatagcctctgtgaaacatcttccacggtctctcgttatatattgtatttgaggattccggatgagccagttatcaagtgcttctccgtttctatcctctaacaaagcaataggtatgtgtgtcatctggtctacggccacactcatataatccttaccttttttataggcaaaatcatcaatacctacataaatacttttattatgcataggattgtgttgtccgcactgttgtaggatgcgtaagcaggaagaactactggctgttatatggaacagttgcaaaagagaagaggcctttcgggaagtaagttccaaacttatcgatctgatgcgttcctcaacaagatagctccgtctaccataccgacgagccagaaaagacaacggttcgcagaatattttttgtggacaagaaacattgtcacaataatatttgccaaccttgatgactaactccaaagtatgaccgtaaacttcaagatcctcaatatgacgggagtagtaactgtgcaatcggtgactgaaatgtccgcaataaggacaggaagcccctttgccagccgtatgtagaaagaccgtcaatgagccaacagcttcagagataccatcttgttgcagattatcgtagccaagactgaatctgaaatcatggaataatcccctatttgtaggagcattttctttttttgatgtatatttgtacgttgtagatatgacttgttgcattgtaactcttaatgatgtggtgtctttaaagttactaaaaagcaaacatatctacaacttttaataggattaagaaagaagaagacagttgaaataaaaaagagattaccaccaaatttgacgaagaaccagatttggcaattttatttctcatattctcatgaatataagtcaacctgttgaaacataatgtaatagagtatgagaaatacttttaaaagttggcatttctcatacttttcctgtgctctatccctaaaaacaggcatttctcatactcattcttgttatttctcatagcagttgtataacaatctactgctattttacgcctgaatcattaatagaaaagttattcttcattaagggtaaacttgttttgggttaatagtaaacttgtttttcacctattataaactataaatgcaagctttgattatataattgcaagtttcatttttataaatgcaacctttgattataaaaacgaagcttgcatttatagtttatgattagtcaaaaataactttatatataagggtttgcaagtttgctattagtcgatagcaactttactgttaatactttccggacggacaagtaatagttagtgtgtgatgataaggagagactgttaggtgcgatagattaataaaagtaacaatggcagatagtctttcagttcattgcgcaaaagttccattgtcttttgcttgtaacggttgatagatttcacactgagattcatctcttctgcaatttctacatgtgttttgccttcaaagaagcttttcataaatactgtacggtagttctccggaagtttgtccaatgtttcatacaacattctgtacagttcgtcaagagtatatacactatccggttccgtttcatagactggagttttcttctgtatgttttccacatagctccattcatattcctgatgtttcaggaaattcaggcaactgtttttcacgcacatcttgatatatcccaatgccgtgtccgattgtaggtcgaaagaatcggtatccatcttgtcccataatgaagcgaatacatctgaaacgatatcctgtcgtgtatccaaatcgtcaatgaatctttttgcatacaggcagaaaggggcgtaatactcctcataaagttgcttgaaagtccggtctttagtctgtgtagaaaaagaaattttcattattttgggattctgtgttttttcatttcgatgcaaatatataataagatagtcggttaaacctaatttcctgttctttttttggttttcagttgatattatcgcctcattttaactggattcgggaaaaataaaaaaaagtttgatttctctgtcctttttgggaatcctgtttgtattattaatgttgttgaacttaaaataatagcctatggaatatatatttcaattgaattacactacgaaccttaattaacaatcttcttcttttgtttttagattcatagtccggggtctcgcaaacgctgacaggaatcaaaagtgagtttatcattagtatgaatgtggataagtgaggataattcaccgccttagtgaaacaagaggagtttgttggtaacattgaatcatttagtaataaatttattaatcaacaaaaattgaaaaacatgaaacgattgagttttttattgatggctgtagtttgtgttatattcttttcgtgtggagaagacgaagacaagcaggttcattcaattactgcatttgccggttatggtggtgccattgcaacagctgataaggaaattgccgtagcgggagaagctatcactgttacggctactcctgctgaaggctttttatttaaagaatggaaaataagagtcggtaatactgtaattgagaatgtgcaggcaaatccttccacattcactatgcctatggaggatgtagtaattgtagctacatttatgataagaaatgatgtgcttgaaagaataaccgaccctgcattgaaagcttattgtcaatccagaatggatacagaacaggaaatagacggagttacttatccgaagtgggacacgaatggtaacggtgtactttcccctgatgaagcgtcagcagtaaaagctattgatattaccggtggggtgaatggagtcaaaataaaaagtgtgaatgaattaactgaatttacaggattggaagtgttgaaaattagtggaaatgaattgactacattaaatgtcgtatggtcccagcttgctaaacttgattgcagtcataatgaattgactgatttatctgtggggggaagtggaaaactgaaagaattgtactgtaacaacaatcatttgtcttcattgaaattaaagactatggtatatgagaatggttatatgctccattgcggcaatcaagtgacagaagagggagaagttcagattcttgaagccataatgactgatgaacaaatttctttttgggaaagtaacttgaagaatcttagtgaaaatgcaaatgtggatactaaaacgatgcctgctgcggatgttcatttgacattgactaaggccgttaaataccaatttggcaatttgatgttaatattaagagatgataacggtaatagcgtacaggtaaccttgaaatcgactgaattgaagccgggagaatattcaaaagaccagatgagtagcgcctatgtgacaatatcgggtggtggaagttatcggaatttagattctgacgaccctggttcatttactgtaaaatatgatgagggtactggaatatacactattgagggtgtattgattttacagccaaatgtatcatatccttctgtaaatgtagtgagatttgaatatgtcggagcgatataatttgtaacaacaatgaaacggaaaacatccgcagttttttctatgtgcgacaaaaaagatccagcggatgttttttctcaagtttgtgaacaattattggtttttgtgtcccttttcaatgagtcggttgtattatttatgtagttgcaattataaaaaggaaatatggataataaagaactggaggcatcattccgcaaggcgaaagctttgggtgatgatattagagaaatggagtcgattgatgcattaactgcttatcgacagtctcaaatgaagattagaggactgaaaaggacgagactgcacaatcaactgatacgttgtgctgcatttctggccataccgttgctattggcttcattgattttgggatatttatattttgcagaatcggaagaagaaataagatacgcagaagttacttctaccatgggaacggtggtgcgttatgaacttccggatcattctgttgtctggctcaattcaggtagtaagttgcgttatcctactgttttcaaaaaagacaaccgcaatgtggaactgactggtgaggcttattttcaagtggaggcagaaccggagcgtccgttttatgtgaatacgccgaatggattgagcgtatatgtgtatggtacccaatttaacgtgacagcttatgaggacgataactacatagaaactgtattggagaaaggaaaagtcaatgtagtgactcccggacaggagacgattacactgattcccggcgaacaattggtttatgacaaacaaacccgccaggtgcagaaaaatcaagtggatgtttatgggaaggtggcttggaaggatggaaagttgatattccgaaatgcttcgttggaagaaattatcaagcgtctggaacgccatttcaatgtagatattgaattcaataatcatttgggaaaggagtatagctatcgggccactttcagaacggaaacattgacgcagatattagattatttagctaagtcggcaaacctgaaatggaagattttgactcccgaacaacgggaagatgatacatttacaaagacgaaaataatagtagatttatattagtaatcatctgaaaaaacaaatagcctatgatataacacatattgataatcaaaaaagggaggagggccgctaccaacggctgtcttctcccaaatctaagattcacggtacagggtctcgcaaacgctaaccggaatcaacaccttagttcatttagtaataaactttagtcagctacaaatgtatgaaaaaaaatcattcatttattgcattatgctttaaatatgctttaaatctaaaacttcctttagttatgaggattagtctaacattactttttgcagtcgtgttgcaactttctgcagcaaatggctatgcccaacgtatacggggagtcatttcgatgaataatgtatctattgaacaggtactgaataagatagaggaaagttcggattatgtgttcctttataatgataaggcgattcagaagaaccgcattgtttcagtgaataataattccggcaagatacaggacattctggatgaaatattctggggtacttctatatcttatacggtggtggataaacagattattctttccgcaaaacctttcgtgcaaaaaacaatggaagatgcgactattcccgtaaaaggtatagtaaaggatgtgaatggcgaacctcttattggagtaaatgtaaaagtaaaaggttcaaatatcggtacaattacagatatggatggtaattttacgattaggacgaagaaaggggatgtccttgaattttcttatgtaggatacacggttcaaaatgtaacaattacgggaaatgcgactttgaatattgtacttcaagaagacaatgcagtgcttgatgaagtcgttgtcactgcattggggatcaagcgttcggacaaggcattgagttataatgtacagaaattgggagatgcacagtttatgtctgtcaaagaagctagtgttccgaatgcgttgaacggtaaggtggcaggtgtcacaattagccagggagcttccggtatcggcggttccacaaaggtggtgatgcgtggtagcaagtctgtaaatgcagaaggaaacaataatgcattgtatgtgttggacggtataccgcttcccgaccttttcccgcggagaggggctacctctaatgcgcagtatggcggagtggacgaaggtgacggtatctccaatatcaatatggaggatattgcggaagtgactgtgttgacaggaccttcggcagctgctctctatggtggtcaggctgcgaatggagtaatcatgttgacctccaaacaaggaggactgaaagacggaaagcctcgtatttcattctcccattattccgatttctaccaaccacttctcttgccgaagttgcaaaatacgtacggaagccggacggatgaattttccagttggggaccgaagctggagactcctgcgaattatgatccggcagatttctttgacacaggcatgagtttctccaacagcatcggggcacagttgggaacggagaatcataaatcctatatttctctttcttcttataatgcccgtggggtagtccataacaacaatctcgaccgctacaacgtttcctataatggtacatataccattacggacaaactttctttgggagctacttttatgtatacgaacaagaaagcacagaatatgctttcgcagggtgactattataatccgattgtaccgatctatctgtttcctcgcggtgataatatagataagtataaatcttacgagcgttatagtgcggacagaggattcccggttcagttttggccttatggcgaccaaaagagaagtattcagaatccgtattggattacgcaccgcaatttcaacattaaccataacgagcgtttcattattggaggaagcttgaaatatacgttcaatgaatggtttaacatcagtgctcgtttccgtacggaccgcgataacaagaagaatgaaatcaagaattatgcttctacattgttgttgctggcttccagttcggataaaggttcatatttgttggcaacggaaaagaatatccaggattatggggatgtgattgctaatttccagaaaacgatatcagactggggatttgtagtcaatgcgggtgccagctttaagaatgcgtcattcgattatacggccaattctaacaaactggaattcggagcacctcttgccagtgtagccaataagtttacattgaacaacctgactccggaaccccaatatcaggaaggtaaaacgatgaagtcgcaagctgtgttcttcagtgcttctgtggattggaaaagaaaaatattccttgatgtaaccggacgtaacgaatggacttcattgttagccaataccaaaaacaagagtttcttctacccgtcggtaggtatgtcttttgtgttgacagagttcttcaaagttccggagaaaatattgacgttctccaagcttcgcctgtcgtatgccaaggtaggaaatgtaccgatgtcacttgcaggaatcacgattccgtcttatccgattagtccgggtggtggtgtaagcatcaatcctgacctacctatcgataacttgaaatttgaaaagacacaatcgtttgaaattggtctgaatgctcgcttcttgaataacaagttgggattagacataacgtattataatgctaacacttacgaccagttgttcaaattcagagcaccagaaagtagcggttatgccaacttctatgtgaatgccggcaaagtaaacaataaaggtcttgaggcttccattgatgccgacctgacgtttggagagtttaattattcgcctaaactgaccgttacatacaataaaaataagattgtggaattggtaagaaatattcctaatccgttcactggagccaatatggatgtttcgcattttgacatgggtggtctttcttattcattccggaactatattgatgaaggcggttctatcggtgatatatatgtcaattcggtgaagaaagacggaaatggatatgtatatgtgaatccaaatactttgagtatgatggtggacaatgaaaacctgatttatgcgggaaataccaatccggattgttctttgggatttaacaatacgttcagttataaagggtttactctttctttcttgattgacgcccggattggcggaaaagtggtttctgccacacaagctgtgttggattctttcggtgtatccgaacagagtgcaaaggcacgtgacaatggtggtgtgcttgtaaacggagtgctgatggatgcggaaacttactatactcaaatgggagcaggtacaggtgtattgtccaattatgtatatgatgctaccaatatacgcttgagagaagcttcactttcttatcgtttcaaaccattgttcaagaactttgtgaaggatttgactctgtccgtgactggacgtaatttgtttatgatttataataaggctcctttcgacccgcaactgacctcttcggtgggtactttctatcaaggtatcgattacttcctgatgccgagcttgagaagcttcggtgtgagtcttaaatttacattataactaaattaacaaacagatgaaaatgatactaaataatagatatttcggcaaaagtctgcttctggtttctgcttgttctttgtggatgttgggagcttgtacgggagatttcatggagacaaataccgatcccaatgccgtaacggaagaagagttagggtatgataacctgggtacgggatcaatgataacgcagatgcagtatcagatgtatccatgtattacaaaagatcagaatatagatgtcaataactatcagaaaatgttcagccttgccggagatatcttttccggacatcagggagcttccaacatgtttgatagtaacggaaggaataatacgacgtatgacatgtatcctgactggtgtgcggctgcttatactgtggcttatcagaattatatgactccttggtatactctttacaccaagaggaatatcaatccttccacatttgcggtgggacagattctgaaagtattcggtatgcaccgtatcacggatatgtatggtccggtcccttataaggatttcgcaccagcttctaatgttccgttcacttcacaacaagtcatttatgaacagttctttagtgaactggatgaagcaatcgggatattgaaagaatttatcaaagataatcccggtgccaaaccattggtgagttatgataagatttatggtggtgattttgaaaagtgggtaaagtttgccaattctttaaagttgcgtctggctcttcgtatcgtttatgtaaacgaaacgatggcccagcagaaagctgaagaggcaataagagacggtgtatttattgataatgaggataatgccatgttaaaagtggatggttctgcaacagtcaatcctttgtatatgatttgttatacttataacgacagtcgtttgggagcaaccatggagggctatttaaaagggtatgaggatcctcgtctggatatttggtttgccaaatcggaagtttcaggatttaaagaatataacggaatcagatgtggtagtatgttcaatggaaatgactataaggtattttctaatctgaatgtctcttcaagtacgcctatccagtttatgaatgctgcggaagtctattttctgcgtgcggaagctgctttgcgtggatggaatgcgggaggcgatgcagaaacattgtatgaaaatggaattgcaactgctttctcccaacctctgggggctactcaagcaaaagcgggagacgcgagtgcatacataaaacggactactttgccgaaaggttatgttgatccgaagaactccagttatagtgacagtagtacgggacaagtgtcagtgaattgggcggatgccactggctttgatgaaaagttggagaaaatcattactcaaaagtggattgctctgttccctgacggacaagaagcatggagcgaattcagaagaacgggatgtccgagagtgattcgggtagctacaaacaatagtggtgggcgtattgattctaaaaaacaagtggctagattaccttatcctaccaacttgtcgaaagattatcccgatttgtatcaagaagccgtgaataattctgaattgctcggtggtgcagataatggtggaacgaaactttggtgggataaaagaaatgataaaccttatcagaattaaaaatatagtgtataatcttaatagttttatatggatatgaaaaacgatcggataataaaatttctgtgttgtctgtttatggtgacccagattatcggatgcagcgattggatagaagctgaaccgactattttgccggaaatgaaatataaggaattgacgccggaagaagaggctgcgttgattgcctacaaaaattcgaaacataagattttctttgcatggatgaactatagtcctgctacttcttccatgcagacccggttaagaggtatcccggacagtcttgatattgtctcattctttacgggatatgtgaataataagcagaatcgggaagatgtgaagtttcttcaagagcacagaggtaccaaagtattgttgacaatgtggccagataaatattttgctacgactggagaaggaagagaggacttggattcgatgatagtatacgctgaaaatctagttgattctatttatacatggggattggacgggtttgatttggattacgaacctagtttcggtggggatagctataccacggaaatgatgcgtacttttattgatgtgatgagcaaatacctggggcctaagtgtgatgaacaatttaaggtgaatggcaaacataaattgttggttgttgacggacagtggaatgacgctgaatatgcagatcgttttgattattttataggtcaggcatataatgccagttccgaatcttcattgaatggaagatgtcagaatggatatcaagactatggaaagggatttccaaatgaaaagcgaatcttttgcgaatgggtgagccaggttggcaatgcgtttggacaaggtggagtgagataccggtataataatgaatacatccccagtttatggggaatggcgcattatgctgcggaaagtccgaataatgtagcgggttgtggcgcttatgtattacagttcggatatgctgaaggaaaccatttgaatttgccggtaccacctaataattactattatgcacgtcaggcgattcagattatgaatcctgctggtaaaacagtggaagatgaatctgaaggaggagaggatgaagtcgaagaataacaattataaagttataaagaaatgaagaatttattcacaaaaaatatatgggctgttgcttgcctttcatgtcttgtgtttataggaacgtcctgcaatgaaagcatagatgtggaagcggtgtatatcactgctgctgaaaagactcctataacgactttctctgcaacgaacaataacgatgaactgggaataacaatttccagttcgttggttgcaaattcaaatatagaaggtgaattgatgattgacaattcgttggtggaacgttataatagtgatcatggggaatcttacaagacattaccggaaggtgcttgtgtgttgtcaagtagttccgtattgatagaaagtggaaaatatcgttctgaagcggtaaaattggtggtaaaggatatcgatgccatacagaaaggcgttaattttttgttacctgtaaagttggttagtaaaaataaagattatcctggtttgccgggaagtgatgttttatatgtcatagtcaacaggaagttacttgtgaatgttcctaaactgaatggacagaattattttaagataaactttaaggataatgatgtcagcagattccagaatatgagcgcatttactatcgaaacaagagtaagtttatgggagttccctaaatactatggtggtaatctaatgagtattataggttttcctgttggagagaatgcagagaaaggtacatggatttttgtagatggaactcctgaccgtgtgggaggtgaaggtgatgtgcctgtctttatgtttgcaacgaaagggtggtcagtgtatgctggtaagttgggatatacgctcgaaaagaatgcttggtatcatgtagccggagtatttgaaaataataccctgtctttgtacattgatggaattttgtttgtacaagcggaatatgcaaatccgatttcattgtcagataagttctacatcggagctgcgccaggagtgcaaaacggtttctatttgaaaggctctgtgagcgaagcacgtttttggacaagggcattgactgcttccgagttgaagaatccgcttcaccgttgttttgtagaagtggacagtgaaggactggaaggatactggaaactggatgacatgagtgacgagtgtaaggattataccgggcacggtcatactgctgtaaaacaaggaactggcgatatagaatggatgactgaggtaccttgtccttgattcttctagtttatttgtaagtttgaatagaaataagaaggagatgtgattattttgacacatctcctttttttaacctaaaccttttatcttaattacttgctattataagccaccaacatccaaaccaacttttcctgttctttcagataatcgctcatcatcgaaacggttacttcgtctccggcttgagaagcgatagataagatcttacgttcttcaccaatcagatagctgatagactgaaggatattattcaatgcttcgtctccgttgcttaccttatccacttcattcacatttgctacttttagataatcgctgaatttattggcaggagtaccacccagcatcaagatacgttctgcgatttcatccaccttttcagccgtgtcatcatacatcttttcgaattgactgtggagtacaaagaaattatgtcccttgatattccagtggaaaccgcgaagattggtgtaatacacttggaagtctgctaatagttgttgcaaagatgctactacgttgtttgctcccgattcgttcaatttgataaattctaaagttttcatattcttctatttttaatgatttatacttgttctctttttttctgtactgcaaagataaggcgtaaaatgcttgctgtcaaactgaaaatttctatctttgcatagatgaaatctataacttaataagatttgatagatgacgatacaacaattagagtatatactggctgtagaccagttcaggcatttcgcacgggcagctgaatattgtcgtgtgacgcagcctactttgagtgcaatgattcagaaactggaagatgaactgggagtaaagttgttcgataggacagtacagcccgtttgtccgacagccatcggacagaaagtgatagaccaggctcgcgtgattctggcgcaggcagctcaagtgaaagaaataatcagtgaagataaacagtcattgtcaggcgtattccgcttgggagtattgcccactatcgctccctatctgcttcctcgcttttttcctcaactaatggaaaaatatcccgaactggatattcgtgtcacggaaatgaagacacaggatattcagcaggctttgcatgccggagatttggatgcgggaattattgccagcaaactggaagatacgttcttgacagaagaaactcttttctatgagcaattttacgcttatgtgtcacgaaaagaatcctctttcaagcatgatatgatccgtacttctgatataacaggcgaacatctttggcttttggacgaaggacactgctttcgcgatcaactcgtccgtttctgtcagatggaggctgtgaaggttaatcagatggcctatcgtttgggaagtatggaaacctttatgcgaatggtagaaagtggaaaaggaatcacttttattcccgaattggcagtgatgcaattgacggaagaacagcggcagttggtacgtccgtttgccattccccgacctacacggcaagtggtactggtaacaaataaagattttattcgccacagtctcttatgcgtcctgaaagaggaaataaaggcggcggttcccaaggaaatgctttctttacagtccatacaatgtttgttatagcacattagggaatccctttttccatcgagaacaatctctttctgtaaaaaatgtagcaaagttgcgttataataatacggatatgttttgatttctagtctgaattgcttatttttggaaagtaaacaaaaacaatattaattactatgaaaaagtacattgcagaaatgattggaacgatggtgctcgttcttatgggatgtggtagcgccgtctttgctggtggtttggctgatacagtaggtgctggtgtgggaacaatcggcgtagctttagcctttggtttatccgtagtagcgatggcgtatgctatcggaggtatttcgggatgtcacattaatcctgctattacattaggagtgtttttgactggtcgtatgaatggaaaagatgcaggtatgtatatgattttccaggtaatcggagctattatcggttcggctattctttttgctttagtttctaccggtgctcatgacgggcctacagcgacaggttcgaatggttttggtgatggagaaatgttgcaggcatttattgcggaagcagtatttactttcatatttgtattggtagtgctcggctctaccgatccgaagaagggagcaggcaatctggcaggacttgccatcggtttgactcttgtattggtacatattgtatgtattcctatcacagggacttctgtaaacccggcacgtagtattgctccggcattattccaaggaggagaagcattgtcgcagttgtggctgttcatcattgctccatttgtaggagctgcattgagtgcagttgtttggaattatctgggagataagaaataactcttttagaagaaagaatataaagaagaaagtaaaagggcggcagtttcacaactaccgccctcttttgcgtaattaatatattatattaaaaaagagtgtgtttcgcatgttcacattagattagtcgtctaagtctaaggaaatttcacttcataagttttcggcccgccataaatggtgttgacacgaattcttagtccctttttcccctccatccggtctttaatcttatccagtttgaaagacacatatccttcacccaaacgttgaggatcatctccttcactgttatgacggaattccagattgatatattcgtcctccgcattgccttcgtcagcagtgggagcagtctcttctttgtcattaatcaccagattcaggaaatgttttttatcttcactatgtgttccgtaatattggaattcaatcgtcagatatttattatccttattgatccacatataagtcgtgttgatcttatcatctccgattttctcttcgtcgttgtcatcttcacccattgtgacgatgtctttggttaagattggattgatacctttcacctgaatatttaggtcgtatccattcacaggctcttccagctcgttgaatatcacaaaagctctttgtccctccacccaatcttcattgttccatccttgtgagttgctgggatacatctttttcccgtcatccaaagtgaaataaaattccttgctatcctggctaatcatattgatggtgctgatagccagaagatcggacgaattatcatcgtcgtccaagcatgactggagaatcggcatggtagtcataatagcaaagataaaggcaatgaatttaaatttcttcatatacttactaggttttagattttataatatttatgttttctgtagtgaaaatgcaagaggatagaaaatattgcattcggatctgttaaagaaacaaaagtgataaaagagttgttctctctatgcagtatttctatctttgctgcatttataaggtaaacacgtgtataagagaatggaagaaatagagttgtcggaacaatgtaggctgggtaataaccgggcccgcaaggaactgtatgaacagtatgcggggcgtatgcttggcatctgtctacgctataccggcgaccgggatacagcccaggatctgcttcacgacggttttttaaagatattcgattcgttcgataagttcacctggaggggtgaaggctctttgcgagcctggatggaacgggtgatggtcaacacagctttacagtatcttcggaaaaatgatgtgattaatcagtcgacacctttggaagagttgcccgaagaatatgaagagccggatgcttccgatgtagaagcgataccacaaaatgtgttgatgcagtttattgaagaattacccgccggctatcgtactgtgtttaatctttatacatttgaagacaaatcgcataaagaaatcgcacaggtattaggtatcaatgaaaaatcttcagcttcgcaactgtttcgtgcgaagagtgtattagcaaaaagagtaaaagaatggataatgcataatggatagatagagatggaagagaaagaattgtggatgaataagttgaaggagaagcttgcggattattccgaaccggcgcctgcttccggttgggaacaactggagaaagaacttatgcctcctgtggagaagaaaatatatccttatcgaaaatggatgatggctgctgcagctattataatattagctgtcgtttcgtcagtaagtctgtattttctagggacacccgctgcggatgaaatacgtcatatacaaactccggcattggcttccacgcccgatgcattgccgggtgtgcaacaaccggatatgcagggaactgctgtggaacctgtcttacggccggtaactcgcgaagatcgtttggcgaaagtcgacaggaatcatacggagcagaaaacaggtgtagatccattagggatcggtaatgaaaataaactttcaacaggaaatggagaagactctttgagtgaggaagataagaatgtaaaaggaaatggagaaactgaaaatgtaaaagatgaaccgaagcaggcagaaaatacagatgtcagtcagggacagtcacaggatacagagcgatcgaataacagaccgcgtcgtccttccggtaaagacaaacttcatattccgacagaaaaaagatcttctcaaaagggaacatggtcaatgggactttcggtaggaaattcaggaggtgcttcaacagaagtaggtgccggatctcatgcttatatgtcacgtgtgagtatgctttcagtttccaacggtctgatggagacgattcctaatgaccaaacattggttttcgaagatggagtaccttacctgcgtcaggcaaaacaggtggttgacattaaacatcatcagcctatttctttcggattgtccgttcgtaaaggtttagctaaaggattctctcttgagacaggactgatttatacgctgctttcttcggatgcaaaactggcaggtgaagaacaacagatagagcagaaactgcattatatcggtattccgttgcgtgccaactggaacttcctggataagaaactcgtcactctttatgtttccggtggaggtatggttgagaaatgtgtttatggaaagctaggatctgaaaaagaaacagtgaagcctttgcagttctcggtatccggtggtgtaggtgcgcagatcaatgcaacgaaacgtttgggtatttacgtggaaccgggtgttgcttattatttcaatgatggctccgatatacagactatacgtaaagagaatccgtttaacttcaacatacaagcaggtgttcgtctgacttattagtacgaactacctcactaaatatagtaacgccatccggttcggataccgtcactatcctgattggatagcgtcattatcctgaccggatggcgttactatttgctatttactatctttttcttcagaaaagtcggataattgagaaaatattaataatattgtcacctgtttatgacctatggctgcatacctttgttgcaaaattctaagatatggtagattctacagatgaaaaacatttattaatcgacttaaaaggcggttcctttcaggcattcgaaagattgtataatatgtatagtggcaaactgtacaatttcattatgcgactctcttccggcaatcaatatatggccgaagaagtggtacaagccactttcattcgtatatgggaagtgcatgaaaaagtagacccggcttcctcgtttatctcttttctctgtacgattgccaaaaacttattgatgaatatgtatcagcgtcagaccgtagagtatgtttacaatgaatatctcatgaaaagtagcgtagaccgtgattcacagacagaagagaatattgatctgcgctttttgaatgagtatatcgattctcttgccgaagaactgcctgcgcaacggaagaaaatattcattttgagcaaaaggcagaattacacaaataaagaaatagccgaaatcatgggaatttccgaaagtacggttgctacccaattatctttggctgtgaaatttatgcgtgaacagttgatgaagcattatgataaggtaattacccttttgttggccttttttgttaatgaaatgtaatagtaatacttgtttttggatgggaagtaggatgaaaatgtatacttgtaaataagtggaaagatggataagacacattataaagagctaattgaaaaatatttcgaagaaacgatcacggatgtcgagataaaagaactgtcagactggataaagaatgaccgtcagttgcatgactggtgggaacaagagtttgagagatcggattcctccatgaacccagtgttgcgtgataaactttttgcccggatcaaagaagagactttgggcaaggaagtgcgccccctccgtatcatcccttggaaatgggttgctgccattttattacctgtctgtgtcgctttcttcacttactatcttttagattcttctccaacggcagaaacaccctttattgtgaaagcgggcaaaggagataaagcaaccatcgaattgccggacggaacaaatgttgttctcaattcagcttcccaattaagttacctgaataacttcggagaaaatgtgcgtcgtgtgcaactgaatggtgaagcctattttaaagtagcccatgatgagaaacacgccttcattgtgcaaatcggtgatttggaagtgaaagtgctcggtacttcttttaatgtatctgcctatgaagatgccaaagacgtgacagtcgttcttttggaaggaaaagtaggggtctatgcgcagaaaatatcgcatatcatgaagcccggcgacaaaatagaatataataaagccactcataagataacagccactcaagtgcatccgactgactatattgagtggacgaaaggaaatatgtactttgagaaagaatctttggaaaatatcatgaaaactctttcacgtatttatgacgtagagattcgtttcgactccaataaactacctaatgaatatttcaccggaaccattccgggaggcggcatacagaatgcgctgaatattctgatgctaacttcacctttctattatgaaatggacggttcggtgatagttttgaaagagaaattgtagaaaaaataatgaatagagccattccgaagcccactacttaggaatggcttttttgttctctgaattgaataagttaacgagagttaaagtctgataggcgattggacgagtgagtatagtagtctgtatacctatcaaacaacttaaaagttttgatatatgaagcacaaaacaacctttgaaaaactccctcaaacaaacgtggggagaagtaagaactggaaaacactgcgggctatttgtctgcttttgtttttaagcgtctcttttaccgtttattctcaaataacggtgaatgtgaaagacatctctttgagagcctctttaaagaaaatcgagcaagtaagcaattacaaattcttctacaatgagagccttccggagttaaaccaaaaagtttcgttaaatgtgaaagatgcaacgattgaacaaaccatgcaacaacttttgggtaaaatggagttaacctacaagaaagagcaagagaatgtcattgtattgattcgtaaatcacaagaaaagcagcgtaatataaaggtttcgggaaccgtagttgattcgcatggagagcctattatcggtgctagtgttgtggtcaagggtacatctaatggaacaataaccgatttagatggtaatttttccatcaatgatgtctctgaaacatctcaactaacagtttcctacatcggatataaacccgttcaacttcgtgctaccgataaaaatatggcgaaagttgttctgcaggaagatagtaagatgattgaagaagtcgtagtcgttggctatactcctatgcgtaagagtgattttacaggttctttggcaagtgttaaggctagtgaattatctctttcagcagcaactgccggacaagctttagtaggtaaagtcgctggtgtacaggtgatgcagacaagtggtgcgccgggagaaggagtgaagattaaagttcgtggaacgaactctctttcagctagtacaacacctctctatgtgattgatggatatccggcttcagaagatgtatatatcaatcccgaggatatcgaaactattgacgtattgaaagacgcagcttcggcagccatttatggttctcgcggtgccagtggcgtggtacttatcaccacaaagagggggaattcaggaaaagcccgtattgattatgactatcagtttagtatgcaacaagtagagcgtaagattaagttgctggatgcctatcaatacagggatttggtgattgaagcccgtaataattattatcgtgataaagcagaagctgctggaaaatcatggaacccattggatgataatgcaataagagcttcaaaaggttttaacttgaatgaagtgggcatttctgatttgttttttgatttcacaaccggaaaaccggtcgatcctacttacaatacagattggcaggacgccatctatgggaatgctccgatgcatcgtcataatctatctgttacaggaggacaggatttcttgaaatatcgttttagtttgggttatctggatcaggatggaattatagctccttccggacataagcgtttgaatgttcgtgccaatgtagatgcagaagtcacgaaacgcttgaaagttggagtaaacttttcttttgttgatgtttcggaacgacaggttcaagcagacggtcgttatataaatgatggtgtcgtacaaagtgctctattaatgtttcctcaattccctgtatataattcggatggaacttatgcagtcggaaatcagattgcgatgaaagctgatggctatcagatggtcgagaatcccgtggcacttgctcatgaaattgatatccgcaacaagtcaagccgaatgaatttcaatgctaatatcacttatgatatattgaaacagcttcagtttaaagccaatttgggaactcaatattatacttcccgttataattactatcgtccgcgtactgtaggacaagatggtgatatgcccaattcggatgctgttcaggcacgtgtgaaagctcgtgacataacaaatcgtgatattgaccgtttgggagagtttacgttaaattataatggtgaattcgggaaacatcgcctgaatgctttagtgggctacaccttacagaaaaaaacttatgaccgcgtagccgttgaagcaacaggttttcccgacgaccgtattcatgaagtgacagcgcatggtccgaatgcttccgatataggcttgtatagcagcgatacccgaaaggctgcatggacaatgatgtcttatctggcacgtgtaaactattcattcgataatcgctatgtagtgacgggtacagtaagaactgacggatcttcacgttttggaaaagaaaaccgttggggttggtttccttctatttctttaggttggactatatcgaatgaaaagttttatcaggatttgttaggtaataattcatccttaaaacttcgtgccagttggggattgagtggaaacaacaatattggtaactacgagcatacagctactatgtctcaaggtggttacgtatatggtaatactgtcgaaacagcctattggcaaggaactttcaaagatgcggctatcggatgggaaaaaacatcccaatacaatgtagggtttgatttgggattattcaatggtcgtgtcaacttgataggtaactattataatagtctttcgtatgatttgttgtacgaccagcctatatcatccatatcgggctcttccagtgtaaaaacaaacttgaaaaatgcaaaagtacgtaatagcggagttgatttccaaatagacgggcgtattttgacaggagattttaaatggaatgtaagtgctaatatatcagtaaatcgaaataaagttgtcgatttgggtggtattaatgatttgtatttagttagtgagcgcaatgtggtaagccatgtgacccgttccgggcttcctatcggctctttctatggctacattgctgatggtattatttccgagaaggattacaccaatataatgattgataaaagcaatctggttaatggcaaatttcctgacggatatcagttgataggaccggcagttcctaattataataacatacatccgggagatgtgaaatggcgggatgttgataagaatggtttgattacagaaaacgaccgtgaaattctaggcaatgcttacccggattttacatacggtatcagtaccgatttctcttataagaactttgatttgagagcgacatttaccggttctcaaggagctgaagtaataaacttccagaaatattatctgtacaatatggaaggctccggcaatcagttggcatctgttttgaaccgttggcattctgacgaaaatccgggttccggcggagtgtttcgtgcagcgcgtagttccactcctaataccagtcagcggcttagttcttatatggtggatgatgcttcctatttccgttgtgcaaatatcacattggggtataattttccggtgaagtggatgcagaaagtgagcgttcaggcgttgaggctatatgtcagtgttgacaatttattcacattgaccgattatgaaggatataatcctgaagtggattataaaggtaataacctgttacccggttttgattggggggtttatcctttggcacgtacttatagtataggagcaaaaataactttttaaataaataaagaatcagattatgaaaaaatacatagtatttatcgcagtaagttcgctattgttttgcagtagttgtacgagttttctggaagaaaccaatccaaataagattccggccagtactttctatcagaccgaagatgatattgcaatggctgcgaatggtgcgtatgcagctttgagaggaaacgggtattataagaatatgtatttatacacagatgttcgttcggaaaacaccacgttgcaggatccgggagcaggaaatggggttaattatcaattttataactatacattgacaacagataatgcacaagtgaaaactcattgggcagatttgtataaatgcgtgacaagagctaatataatattggatcagatagatgatattccttttaaggatgaagttgtgaaaaaccagaaaaaggcggaaatgtatttcttgcgtggattgacttattttcatcttgtaatgcagtttggagatgtccctatcgtaaccaaagaactaaagacgaaagatgaaattcagaaatatactgcccgccagccaaagagcgaagtctataatttgattatttccgatttgacacaggttattaatagtgaattgccggatattcaaacgggtaatggggtaggccgtgcttcaaaagctgctgcgtatgctttattgggcaaagtttacttgacaatggctgctgattctgattttcagtcggaaagaacttcaaatctgcaatctgcgaaaacaaatttagttgcagcatggaacatgaaaccttttacaagcctgaaagatatcccttatgctgatgtttttgataaggaagctcaaacattctgtcaagagaatatttttcaggtgatgtataaaggaggcaactccagtttagcctcaaattacgcctatatatttcaacccacttcccagacggggcttacttcgcagaaaacggggacggggaataatataccgacgtctgatatgatgagtgcctatgaatcgggagatacgcgtaaggctatctcgtgcggtacgtcacagaacgttaattatgtgaagaagtacacagatctcgatgacataaatggctatggggcgaataactggattgtgcttcgttatgccgatgtcgcattaatgttggcagaagtgaaaatgcatttgagcgagaatgatgcggtaagctatttgaacatggtacgcgaacgtgctggtctggatgattattccggcagtagtttgcgcgatgcgatccttcgtgagagaagagtcgagtttgcttttgaaggacagtattggtatgatttgttacgtctttattctcgtcaggaactgttggagcacatgaaagcgaagaatccaaatttctctgcgaaagattttttgttgcctatcccgtatgatgaacataaactggatccgacaagaatgtatcaaaatgaaggatataactaaaaataaaatagtatgataagaaaaatctcaaatatcatttatatatcagtattagcagtcgttttatttgcttgtggggatgatagtacgattgaagaacaggggagtggaacgattactgctagagttatggcaagtaatgcctatccggcattagaagagaaagttgttctgaaggtagctcttaatgatgggcaagacatccaatctgtggtttggacgatggaagggcagacattgggtgaagaacctgaattggaatatacgtttacgaaagaaggaagttataatatttcggttagggtgacagataagactggcaatgtagcggcggctctgcagaaattacaagtatccggcaagagtttacgttatgctttgcaacactttgaccctgcaaaagtttggataatggggcatcgtggcaattcttccaacccgaatattcccgaaaattcgatagctggaattgaaagttgtatagaattagggggagctgtagatattgtagaagtagatcctcgcatgacaaaggatggagtaattgtgttgatgcatgatgaaaccatagacaggacaactacagggaaggggaaagtgaaagatttgacttatgagcagctccagtcttatcgtctgaagctggcagacggcacagtaaccaatcacacggtcccctctttgtatgacgcattggttgcagggcggggaaagatcttttttgatttggacttcttgaataaagtgtctcctaaagaactgtatgatgttgtgaaaagctgtgggatgttagaccgtgtgttcttttatacatctaataatcgggatgtcttgcagaatattttggattattcgccggctcctataccttatccgcagtgtgaaaacgaggagcatgcagatttcctttcacagcaaccaggagtgatgtttgcccagatatctttgtcgaaaacattaaatggcgggctctcgacagccatatcttcaaaagggctgtttgtctcgactaatatgttagatatgaatggttatacctatgatacacagatgacacaaggaaactatacaggagtggacttgattttgtcgaaggggattaatttgatacagacagaccatccccagttgctggatgcctatctgaaacagagaggtaaaagataattggttttaatcttaaataatgaatagaatgattatgaagaaatatatattcctgatagtgacagtcgtttgtctatttgcatgtaaggacggcgatgaagtgcggcagacaacctccccggaggcttctttttctatagataaagaagaatatacggtcggtgatatcgtttatctgactgatgaatcagtaaagacggaaggagagatagtagagtatttctggcattttggatttgagggggaagggaatagggctactactaaagatgcgtccgttttgtataagagggctggaacctatgttattaaattaaccgtgacagatgaattcggaggatatgcaactgcatcccatactgttgtgattcgtccgacgaatatgcctccggttacaaacttcagctatagccctgccatttgtaaagtgaatgagaaagttcaatttaccgataagtctgtggatgaggatggagaaattgtttcttacgagtgggattttggcaatgggcagacttctcaagaaaaagacccggaaataactttcacgacaacaggatttgtaactgtaaagctgacagctactgatgatcgtggagctacaaatacaaagcaagctactttatacgttcgtgatacttctatatccggagtaactgtcctttgggataagacgtttgaggtatcctcttctttacggtctatctctcctgctgttggtgacaatggggatgtatatgtgtcatccaatgcactccacctttttgcttattcgccgtccggagagcaaaaatggatgtttgatttaagcaaggacggaggagcaggaaatcaaggttcgtctcctatggtaggtgcggacggaactatttatatgggtgcgagtacaacagacaaaaacataagcagcagtctgtatgctattcatccggatggaacacaaaagtggagatatgaactaggtattggtactaatattccctatatttctcctgctttgtctcgtgatggcaatatcttgattggaaatagagggacggatggttctgtacacatggttgaccgtagttccggcagacaactttggagacgcaaatctcccaatggtggtgctaatggtggtatatcggttggacagaatggagttatctattcagccttgtcgggagcgaacggatttgcccgtactacgcaagatggtgtgaacttgtctcctaatctagggaaaggaaatacggctgcagctgtatatcccgctattgatgcgcaaggaaatgtatatgtggcattttctgaaggagtggttgcagcttatgataaccagggtaatgagttgtggagatatccggcgagtggtactatgggcaagattgaccagggaggaccggctatcggtgctgacggaaccatctatgtgggtacaaagaatccgaatgcccaagttgttgccctgactaaaggaggagcaaagaaatggagttattcctctgtcgctgaaataggaacaacaccagctatagacagtgacggaaatattcacatctgtgatgatggcggtaactatataatattgaatgctgatggtacggagaaatataagagacaattaggttctaaaatttggtcgtcaccagtcattgctgactatggtattgtgtatgtcacgtatgaggataatggtgcctgcaaattgatagctattgattgtggtattgaaggacctgcaaattctccatgggcacagcgcggacagaatgcaaaaagaaatgctttacaaaaataaaaagatatgcttagaaagataaatatattaatagctttaacccttctgataataggagggttagaggcacagaatcattcggataaaataattgcgaatctacagaagcctgcaagtaattcagttttagttgtttctcatcgagctgactggcgtaatgctccggagaactccctgcaggctatccagaattgtattgatatgggggtagatgtaattgaaatcgatctgaagaaaaccaaggatggacatctgattttgatgcatgacaagaaaattgatcgtactacaacaggaaaaggttatccggcagactatacattggaagaattacgtcagttccgtttgaaaagtggtacagggcataaaacagctcatttgataccgacattggaagaagtaatgtcattatgtaaaggtaagatccttgttaatattgataaaggctatgattacttcaaagatgtatatgctgttttgaaagaaacaggaactgttcagcaatgtattattaaagccggacttccttatgaacaagtcaaggctgaaaacggtgatgtattggataaggtaatcttcatgcctattgtacaacttcataaagacggggcggaagctgtcattgatagttatcagacacatatgaaacctgctgcttatgaattagtgtttgatagtgacagtccggagattcttaatttgataaagaaagtacgtaatacaggctctaatctttttataaattcgctttggcccgaactatgtggcgggcatgacgacgaccgtgcagtagaacttcatcagccggatgaaagttgggggtggataattggccagggagccaagctaattcaaacagaccgcccagctctattattagagtatctacgcgaaaagaaacttcacgactaaacgcactttcttcatgttgaaacaactaatcaatttttacaaggtctcttcgccgagaccttgtaacggagaagctttgtcttcatccgatgctcgccgtctgaagtttctgaaatggtctactttcctttctgcgacttttggttacggtatgtattatgtgtgccgtcttagcctgaatgtcgtaaagaaacctattgtagatgaaggcattttttcggaaacagagttaggcatcataggttccgtattgtttttcacctatgccatcggaaaattcacgaacggtttccttgccgaccgtagtaatatcaaccgttttatgactaccggtttattgataactgctttggttaacctctgtctcggttttactaattcttttatcctgttcgctatcctttgggggattagcggctggtttcaatctatgggagcagcctcttgtgtagtagggctttctcgttggttcacggacaaagagcgcggttcatactatggcttttggtctgcgagccataatatcggcgaagcgttgacttttctgataatagcctcaattgtcagtgtgttgggctggcggtatggtttcttcggagccggtatagtgggattgataggagcgttgatcgtctggaagttcttccatgatactcccgaaagcatgggatttccttcggtgaatgttcccaaacagaaaaaggaaatgagtgagacagaaacggctgattttaataaagcacagcgtcaggtattgctgatgcctgccatttggatactggctctttcgagtgcttttatgtatatcagtcgttatgctatcaatagttggggcgttttttatttggaagctcaaaaggggtactctacattggatgccagttttatcatttctatttgtccggtctgtggtataatcggtactatgttttcaggtgttatttctgataagttatttggtggacgtcgtaatgtccctgcgttaattttcggattgatgaacgtaatagctctctgtctgtttctcttagttccgggagttcatttttggatagatgtgttggcaatggtactttttggtttaggaatcggagttttgatctgttttctgggtggtttgatggcagtggatattgctccccgtaatgcttcgggtgctgcattgggagtagtcggtattgccagttatattggtgccggattgcaagatgtgatgagcggtatattaatagaaggccaaaagaccgttcaaaatggagttgatgtttatgacttcacctatatcaattggttttggattggggctactttgctttcggtgttgtttgctttgttagtttggaatgcaaaatcaaaagaagtaagctaaagtgagtacattaggttagaatataagtctttgttttcgaggtattagtcaccatttcgggaagtaagtaatgattgctcttcccggaatggcttttttatattcattttttaataatgttttatggaaaattcatgtaatgatgaattattgtgttcattgaaagatgaacttcgtgaagtaaccgcacaaatcaatgtgcatagtgaaaaattaatggagctgctcgaccaaaaaaaagaatcgtcagtcaactgactcgagagatgtcgcatctcacgcctgtcaccattgagtatcggggaaatccgaagcaatatgtctctgttgtgctcgatgccatcaatcggggtaggttgacgtatgacggaatagcaaattgcgaacagacttttcgtgcgttagcaagcgttgtagatgtgataagccctaagaatgggaaaacgcttagtgtagagacgctggtgtcttatgagaagaaaaagcgtgctggagaatttgaggaaaaataatataaaataaaaagacgattgttgtatagttgaacaacaattcgtatattgacctccaaagaaagaaattgaaaaagcaaagatattaagaaaggagtattatggaagcaaaaacaaatgaggaattctttaacgtcagcgcattaatagatgagcgttttggtaaggaaggaactgttactcgtgcggaagcagaagaaaaagcgtatgctttctacaccgggcaaattatcgaagacgcaaggaaaaaggctaagatcactcaagcagagttagcccggcgtatcggttccgatcgttcttatatttcaagagtggaaagtggtcagacagaacctaaggtttctactttctatcgcatcatgaatgcgttaggttgtaggatcgaattttcgatgtctttataagaagcgattaaaaaaacatggtgggaaatttgaaaaagataactgtctttttcaaatttcccaccgtttttttgaggaaggaagaggaagaaaaaggaaaaaggtgagggtaggtgagggtaaatttctaacattcgtattttttttttttagaaaatagaagaatagaaataagaaatataaaaatgaaaagttgcaaaagtaccctcaccaaccctcacctttttgcgtgcgaaggagatgaaatcttattcatatagcctgtttgatttcacctgttccgtatcaataatgaatacagtgtatcttctcccgttttttcccttatgaaattcgaagccgtgtttggacatcacttttcctagttgggctttggttccgtgagaatattgataccccgtccgttcgcgaatcaattccgcaatttcagtgaccgtcagataatgcaccttttcaaaacgttccggtttgcggatatgtgtcaacaccagttcttcttccggtgagtggaaaatgaaatcctcgttgttttcttcaatccgtgagttttccgactgggtgaaccaatactgataccccggcttgttgagtagatacttgatttgtgcatacaactgcgcgtagtttattttgataaactccatcgagtcgacatgaaagcagagaaaacggcggttacctgtggtgtcgtgaagcacttcctggtaattgcatgtgccggcaaaagaagccgtatgaggaaagttctgcgaacgccgcgcgtatggcaggcggatgctgattactttgcgggtaaccaaatccttgaagatattcagttcccgtccgctcatcccttcaaactcatccagattgataagcatcgcctgcgctattttagccagatcatctttgttgctcgggttgataagaccggtagaaagataggcgcgcaattcgggcggcagcaggttgttgataaacgtagtctttccgatgttctgtatttcgctgcaaagcaacaaaacagtgtggttcaccacatcgtcttgtgtggcggcagcgcacattcccaccagataacgttccagacattctacccaaaatttctggtgactagtatgcacgctgttggcaaggataccgatataatccgttccgtcccattcaggtagcgagtctaaatactcgcgaataggatggtaggtgatgctgaagtcggagtagatcagattctgaatcgtcttgacggtgcacgaatagcccagttcgttcatctccatccaaatgctgttttccatcatttcgtcgagaatatggaaaggttccggttgctccgtgtccgttttccttctgcgatattccatgatatgaagcacttcgttgtagcgtgtatcgtaattttctttgatatgttgctcaatctgtaacattcgcttctgcgtactattcagcttgcgggtgtcgaattcctcgttgtgtccgtaagcactcccgatcagtgcgtccatttcatccgcgggaagatcggtgaactggctcttgataaaagctgccgcctcttcctgggggacgccgtagcgattgtacatacaagctaggcaatgcaggtagttgttccggttgccggtgacgtacttttcggatttattgtgataatagttcagagtcaccattaaggaagcgtgcgaggaatggtagttgagggccacttgttcggtgaggggattgttgtctggtgctgtcgtctttttctttttgccggatgcccttttcttcttttgagacttgaagaacatcggtggctgttccacgatgacagctgtggcatcgggattgaaataaatatccggatcgtaagagaacaggcaagtgcggctaacatcctgcccggaagtgtcgacctcaactccgcagagctgggcataaaaggaagcgattttgtgataagcagcatgatggaaatcttcaatttcctgaattgtttcgggcaatgtcccgtctgtccggcatacacgtaccacgattttcagtcccattcctttggggctgatgaaagcgatgcgggtgtgggcacacttttttgccagtgcgaggatgcgtgccaatgcttcctgtgtctgatggtcgatgtctactacgatgtatcccagatacttgacgagagttgcgtttgaacgtcctccccggtagttggctgaaaaggtgatttccggtagttctattttcttttcgttggctgctttctcgccttgttccgcgaagattcggcgcacgtcctccaccgtttcccggtatgtgccgttgctgatggccgatacgatttcttcttctgtcatttcggctatgacgcggtaaaagtcttgaaagatggtaaaatgatccatgttagtttgttctttttaatttgcggttgcaaagaaatttgtttgtaaaataatagaatggaacttttcgtttttttgattaagttcttagggttctcccaaatagcgtatgatcgttgccacctgccggggagagagaaggcggttgcgggcacgatagccttcttgttcgagttcttgcaggagcggaaggttgtagacaatccaacgacgtagtatttgtaaggctactttgaggcatacgttggggttgtaaagatgagctagttccgactttttataagtgcggataagaaacggttggtccggataatacatgatgaatgatgtttggtttatgctataaagttactgaaaattaatggtttattaaaagaataacgtcattattattcatagagtatcaggaaacttcgttggggaatccggaggatggaaaatgtgttatctttatgtcgttaacaaataaggaacgcgttcgaaatgtgtgaaatcttaaaattattttattatggcaatgacagtaacttattcagtagtgccgcgcaagaatcctgccaaaaaggatgagtcggcaaagtattacgcgcaggcacaggcttcgggagagttggattttgaagagttgtgcgaaggaatcaccagtcggtctacctgtacggagacagatgtgcgtgccgccatttcgggtattctttatgaggcgaagcgtgcgttgaaagcgggaagaatagtccggttgggtgatttgggcagtttgcagatcgggttgaacagtgaaggagctgtgtcggtcaaggagttttcaagttcgctgattacggctgcccatattattttccgtcccggaaagacgttggcggacatcacgaagattcttagctaccagcaggtaacgacgcgtgcggtggcccaaacgggcggtagcggcaatgaaggagaagatgatgacaaaggttccggtggcggttcagacggtggtggaagcggagaagctccggatccggcagcatgataactttaatattggatcaaatgaaagaaattgtaactaagattttggatgtaatcatgttccttgtgcctttcttcggaaaaagaaagcggaacagaattgtgagagaggtgcgcttcaatgctacccataaggaagtgtgtaatgtgaaaacgacggaaagggagaaggacgatgagaaagattagtctgattgtgattcactgctctgctacccgtgtcgatcgcgacttcacggcgaaggatgtggacactgcccatcgctttcggggcttttcgtgttgggggtatcattactacattcgcaagtcgggacagatagagccgatgagggatgaagatacggtgggtgctcatgcacgcggttttaatgcgattagtttaggggtgtgctatgaaggcggactggatgaggacggaaaggcagcggatacgcgtacttcccgccagaaagaatctttgcatcgcctggtgcgcgaactgttgcagcgttatccggatgcaaaggtggtcggtcatcgggacttgagtcctgacaccaattataatggaattgttgacccttgggagcggatcaaagagtgtccctgtttcgaggtgaaagcagagacatggtgatttttatcctatttattactgtggtggttaattgaccaccacagtagtgaaatactctttaaatacctccgcagctttttcaagttgttcgggggtattttcttttacgtctttcagcttgtattcctgctccatcgcttcatacttatgtacgcctaatgtatgataaggcaggatttccactcgttgcaccatcttatattttcccagagcttctcctaaacggcggatgtcttcctcgaaatcgctgtatccgggcactaatacataacgcagccagaaaggtttctcgttttcttccagccatgctgccgtgcggatggtttgctcgttacttcttccggtcagtgcttgatggcgtgccggattgaactctttaatatccagcaatacaagatccgtcagtttgaaaagttcttcaacttcttcgttccagataccgccgttgctgtctatgcatacatgtattcccttttctttcagttcacgcactaaagggactagtgctttggcctgaaacgtaggttctcctccggagaaagtgactcctccgcgtttcccgaaaaaaggacgttggctcatagccatgcggacgatttcttccggtggggtaggtgtgcctccttttccggctatcgtgtcggggttggcacaatacaggcagcggaaattgcatccttgaagaaaaacgacgagccgtaagcccggcccgtcgaatgttcccatactttcgtatgaatgtacgtttatcgtcatattgagtagatctgattacatacgttcgtggaagctacggctgataacttccaattgatgttcgcggctcaacttcacgaagtttacggcataaccggaaacacggatggtaagttgcggatatttttccggatgttccatggcgtcgtaaagcatttcacggttcagtacgttcacgttcaggtggtgagcgcctttggtgaagtaaccatccatcattgtcaccagattttctacgcgatcctcttcagtagctcccagtgatttggggacgatggagaaagtgttactgataccgtcctgtgagtcgcggtaacgtaatttcgctacggaactcaaagaggcgatggcaccgttcttgtcacgtccgtgcatagggttggctcccggagcaaaagcgacacctttggcgcgtccgtcgggagtagcacctgtcttcttgccatacatcacgttggaagtgatagtgagcaaagataaagtaggacgggcatttttgtaaaccggaagtttcttcaattcttcgctgaagaaatagaccaggtcaacacccagatggtctaccttgtcgttgtcattaccgaagcaagggaattcgccttgaatatcgaaaccttctgtcagaccgatgtcgttgcggcgtgcagtcactttagcatatttgatggccgacagtgaatcgagggcgatagaaagtccggctacaccgtaagcaaggttgatgcgtgggttggtatctacaagagccatttgggctttttcgtagtaatacttatcatgcatataatggatgatgttcatcgcttcgttgtaaacacgggcgatttccgtcaataccttcttgtagttgctcattacttcttcgaagttcagtgtgtcgctggttagtacggggatatttttcaccattaccgtaccggtgttttcgcaacgtccgccgttgatggcaagcaacagggcttttgccaggttgcaacgtgcgccgaagaattggatttgttttccgatttcctgataagatacgcagcatgcgattccgtagtcgtcagactggcgtacttcacgcatcaggtcgtcgttttcatattggatggaagaagtgtcgatagatacttttgcgcagaattctttgaatccttccggcagttccgggctccacaatacagtcaggttcggttccggtgaagggccgaggttgtagagtgtttgcagaaagcggaaagaagtctttgtcaccttggtacgtccgtcgttgaggcgtccgcccagggattcggttacccatgtcgggtcgccggcaaagatgtcgttgtaagattgcatacgcaggtggcgcaccatacgcagtttgatgacaaactggtcgatcagctcctgtgcgaaagattctgtgatggttcctttgctcaattcatattccatataaatgtcgaggaacgaagagacgttacccagtgacatggcggcaccgtcttgttcttttacggcagcaaggtaagccatgtatacccattgtactgcttcttgtgcggtgtaggcaggacggctcaagtcgagtccgtagtattcgcccattaccttcatgtcttttaatgctttgatttgctctgccacttcttcgcgcaggcggatgcgggcttcggtcatcggaccggtaaggttacgcaaatcttctttttttgcctcaatcaatcggtcgataccatagagagccatacggcggtagtcgccgatgatacgtccgcgggcatagttgtcaggaagtccggtgaggaatcccagagaacggaacgagcggatttcttcggtatatacgtcaaatactccgtcgttgtgcgtcttgcggtagtgagtgaagatatcttttacgcggtcgtccacttccacgccgttttcatggcaggctttgctcaccacgttgatacctccgaaaggcttgatggcacgtttcagaagttcgtctgtctgcagaccgacgatcagttcgttttctttgtcgatatatccggctttatgagaagtgatggttgagacggtgacattatccagtgagcgtactccgttattggctctttcttctgccagtgcttcgaggcagcggttccatacagcttttgtgcgttcggtaggtccttcgaggaaagaagcatctccataatacggagtgatgttgtgactaacgaaatctcttacgttgatttctgtgctccaaagaccgtctttaaagatcttatttaattccataaatgataaaattagaggttgtagttatccttttctttagagcgcacaaagttacaacgttttttcatataatcagcataaatatgctctattttatgcttttcaacataaaatacctagatattgctattctttggaaatgatgttcgtgatttttttttgtgaaaactcttgtaagtttaaaatatattcgtacctttgcaccgcttttaacgaaaagcacttctgataaagaagttttggagaggtggcagagtggtcgattgcggcggtcttgaaaaccgttgtactgcgaggtacccggggttcgaatccctgtctctccgctgaacgtgctggacagaaatggtcagcaaacgggcaaaaagctacaagtcaatgatttgtagctttttttattgcccgaaagtcctgcttccaagacttcaaaagtacggtaaaagacaaagtttcgttactaaatcgttacctattccctgccggacaaaaacggtaacgaattgtccataaatgacctgataatgactatattagtccatagtctgcataactcgaaaacgagaggtaaaaactaattttgcaactaaaaattttgagttatgaaatcgacattcaaggttcttttttatttgaagaaaggttctgaaaagaaaaacggcgaggttatgattatggcacgcatcaccatagacggcaaactttgccagttcagtacgaaacagagcatccagcccgacaactggagcattgctgcgggcaaagccaaaggcagggatgccgggaggataaacgcccttttggacgacatacgttcttccctgaataccatttaccacgaaatgcagcggcgtgacaactacgtgaccgccgagaaagtgaaaaacgagtttttaggtcatagcgagagccacgaaacaatcctttcattgttccaaaagcacaatgacgatgtgaagcagcttgtgggtatatccaagacgatagcgacctaccgcaagtatgaagtgacccgccgccacctcgctgaatttatccaaagcaagtacaatgtatcggacatatccataaaggagataagcccgatgttcattaccgattttgagttgtatttgcgtaccgcctgcaagtgcggctataacaccaccgccaagttcatgcagttcttcaagcgtatcatcatcattgcccgtaacaatggcatactggtgggcgacccgttcgccagctacaaaatccggctggagaaagtggacaggggttatctgacagaggacgagataaaaatcatccttaaaaagaaaatggtttccgaacggctggaacacgtcagggacttgttcgtcttttcctgtttctgcggtttggcatacagcgatgtcgccaacttgcggcaggagaatatccaaaagtcctttgacggcaacctttggataatcaccaagcggcaaaagacgaatacggacgtgaatgttcccctgctggatattcccaagatgattttgaagaagtacaagggcaagttgccggacgggaagatacttcccgtaatcagcaatcagaagctaaacgcctacttgaaagagattgccgatatatgcggtattaaaaagaacctgacgttccaccttgcccggcacacgttcgccacgaccaccacgctgtcaaagggcgtacccattgaaacggtgtccaagatgctgggacacacaaacatagaaactacgcaaatttacgcccgcatcaccaacagcaagataggcagcgatatgcaggggcttgacaagaagtttgtcggcatcgagaagatttacaaggaagtcgccatgtaatcttgattattgggaactggtcacaaattgtgaccagtccttactattattccaacattgctaaatctcctaaaatatacgattatggatttgcagattatccaaaacaagatttttgaggtcagaggttgccgggtgatgctcgattatcatttggcagaactctaccaagtggaaacacgagccttgaagcaggcggtcaagcgcaatatcgagcgttttccgggtgattttatgtttgtactcacccaagaggaagctaacttgctgttatccataggggtatcacaaaatgtgataccccctgcttacaacttcggcgttgctatgcctatggctttcaccgagcagggcgtagccatgctttcttcggttctccgctccaaagtagccatagaagtaaacatttcaatcatgcgggcttttgtcctcatgcgccaaatggcaatcggttacgaggaactgtcaaggcgcatcgaggaactggaggtaagcaccgatgcgcagttcaacgaactgtaccaagcccttacccagcttttgagccagtcgaaacaacagaaagaacgccgtccggtaggtttcgttacctataaccgtgacaaaaacgaataggtaacgatttcggtaacgaaattccgcctaacaaactatatcccaatgaagtacattcttccaccttgcgggcagtccaccgactacccgcattttttatatccttttccaactggcacattccccgaaacgccagccgtgcgtggcatggctgactgtatttcgtgaaaagagccgttggaaacccgcacaagcgtattgcaagcaagctcacaacacccttgcctttcccgcccgcatggagtgttccctaaaagatgaaagagaacaggcacttttccccggtttccctatctgtaaatcttcctcttacgcagtcccccagccgggacagtcgttttaatcatttcaataggcaaaggtagttacgtgttcttcacgattttgcaaggtcgagccgttccggtttggcgaaaaaatcttccctgccttgcgaggtattttttgcccaaaaccttgcaaactctaaacactacccttttacgcctatgtgaaacgaaaacgaccgacccgaccggaagacgcataaaaaaaaagtcggatttacgggaaacaggaaaaaagttcagtgaaacttcaactccctcacctctcaaatccgcataaaattaaaaacttaaaaattacagcaatatggaagcaaaggtattatcggaagcaaaagtttatgtaggcacttatgccaagtacaacaacggttcattgtccggcgcatggctcgacctttcggactattcggacaaggaagaattttatgaagcctgccgggaacttcacaaggacgaggaagatgcggaatacatgtttcaggactgggagaacgtgccggagggcttaatcgacgaaagctggatttctgaaaacttcttcgccttgcgtgatgcggtggaggatttgagcgacaccgagcaggaagcctttttcgtgtggtgcaactataaaagccatgatttgggcgaggaagatgcggacgaccttgtacgtgatttccgggatgaatatcaaggggaatatgacgatgaagaagatttcgcctatgaaattgtagaggaatgttacgacctgccggagttcgcaaagacctatttcgattacaaacagtttgcccgtgacctgttcatgtgcgattactggtttgatgacggctttgtgttccgtgcggcataacaaccaatccgggcggggtgtcaaagccctgcccgcttaaaacaaccaagtttataaccataaaaaataagacatcatgcagtcacttaacaaaaacggggtaagcatcacccaaacaccgggagaagaaaagttcgtgaaatgccgtttaggggctttcaggggacaaatttattatcaatatgactaccgccacacggacggcgaacttttcagcacggtagccaaaacgctggacgagtgccgccgcaggcgtgacgaatgggtagcgaagaagaacggagtaataaacaagtaaatttcagggacatgaaaacgacagaagtaaacaaggagcttatcggcaggcgttgcgagtgtatttttacgggcttaatggtaacgggcgttatcgaggacacagaagaaaacgaacacaccatagaggtaaaagtccgtttcgaccacccgcaccagtggggcgatgatttgtataatgatgtgtgggcgtgggggcgcaaaatagacgagttcggcacgctgcatcatttgcaactgttggaggacaaaccggactttcagataatgacggtagttttcggcgagccaatcagccggatagaccgcagtgtttttgcagatgtggacacgtggggcgtctgttccttgcaaggttgggtaaacagctatgaaagtgtccggtttgtagccatagacgaccatacggcaatcatcacgggcgaatataacatggagcaggtaaaggtgtggttagagaaatacacgtccataaagagccttaaaaccagttgatagaggacggcggctgcttgccgccgttactttcttccgtgagcctgccagcgggtgaagaaagtaacaaagaagcctttcgttttccctatcatggaaacagcccgccgatgcttcccggcgggctgtctgcccgatatttacgctttgcgtatcattccatacccggtttcccaagaggatgataaaaacggctgtcgcaactataaatcctcatagtgaataaattttacaccaagtatgcacacggtttcttcttcctcgatgtcatatttccatgtccgtttattgacaagcatttccgtttcgcaatcgaaccataccattacgggcgcatcgtcttcttcgtccgcccatttgaaaacctgattggacggcgttttccataattcagcactgtcacgttcggaaatacagtccttgtccacaatgatgatgtcacctactgccggaactgtatctgtttccaacgtggtttctatgtaccacgagataccttctatatccaattctatttttaccatgtcgttttattattagggggttattgtttccgttccttcttcgctgttgtcattattaaatgatagtgtaagttgctgcatctgcccgaagctgtcgatgatataaatgtcaatcgtctgctggtcggtcgatgccgaggtgtagtagagcctgaacgtttctttctccagcgggtagaggtcattgggcaggaacaccgtgccgttatccatttccagctttcctttgccgtccggctggaaataccgtatctgataggtagtcggctggtaatagccgccacgcaccagtcggcagcgtatttcggcggtttccccgactttcagttttttaggcacgggtagcgtttctaccgtgaacgggtacgcctgctgaatatccagttcatcattacaggcggtgacaagcacgagggcggccacgatgtagcagcccacgatgattttatacattacattcttcatatacattgttatatagcggtcagttgataatgaatttcagtcccaaagatacctgcgtgtggaacttgcctatgtccgagccgaacaacgcccgttcccttgcgctcaacagcagagccacccggtcggtcaggtaggtttccagttccagcgtcagcgcaccgccgtaaatgaagcagtccttatccagcaaggtagagccgtccggcagcagcttttcgcttcggttgcttgtttcgtacccggcgagagccgacaagcccaatgaaaggaaaaaggtctttcgtctgtccgataggaatttcaggtaatagccgccctctgcggtgaactgttctacgggtatctgcatatccttgtagtcatacttcttgtgcaggtattcgccgccaatcacccagcggttggcgttcttggtgtaaacgctgtacgccgccccgatgtggtaggcgaaatcactgccagcgttccaatgcaccccgtccgtcatgcccgccgtgacctgcaagcctttcatgcccggcaggtatctttgtgcgtgtgcctgaaacgaggtcaggcacagcgcaaagagcatcattataaagatgtgtcttttcattccctatttgatttttagttcgtcaatcacttctgcgttcacgatgtcggcgttttccacccgtatggtctgatgccgcccgccgttcttctcgtagagttccacgaccagcagcttgtcgtcaggaatggtaaacttcggcagggcgtacaccgtgcgcacggtcgatttcccggcaatctctatcacctcgttgtagctgcgtaccgcatccagtaccgtttcctgaatagccgtgcgtttgggcactttcttatcggttatcttaaacctgatgaagtccgtgtcgaaaggcacgttggaactgttctttgtctgcgtgtgcacgtagagcatcccgttataggtgtaaatccccttgattaagaactgtatgccgaaacgcttgctacccaagtggcgcactttccggtcattgttcttgtagatgctctgcattatcagcttcactaatagcgggctttcacccgccagttcccggaaatggatgttcatccgggtatgcgagaagtcggacgtatcttcattctccaagaagtccttcatttcgatgttgagcatttccggttcacgggcgtacttggcgttgaacgaaaagaaactgccgtcctcgcagataacggagaagttcgtttctcccggaaagccctctgtcgtggctttcaccctgattacgttctccgcaccgtccgccttgcccgctatgatgtggttgcttcccaaatcgacatagcggacggcggcggggaagatgatatgcaccgtcttggcaaaggtcacttccacgccgtagggcgtaaccatttggcggtacgggagtttccgggtaatcccccggtacaagtcgttgccagccgcatacttcacggtgtcagcggtttgtgcgtttgccgcacacacgcccagcaagagggcgaacaatccaaaaatctgtttcattgctaattgaaattttaacggttgataaaatggttattgttgtttggcatacagcatgactttatagcctgctttcagcttcactttcacggttcggaacttcttggcgaggtagccggacgttccttgcagcaatccccttgtcacgtccatagccacctgctgcccggcactttgggcaaaggaaatgcttgtacccagcccgcttccgatattcgccatagcttcgttgaacgcttcctgctccatagaggacggtacggaaagccccttttgcccgtccgtgtcgaacacggcgagttccaccgggatgatgttgccagcgtactcaatcgaggacaccagtatgtcgagccgttcgccctgcacctttgccgtccccgccacaagggtattcttcggcacaacgatatttcccgcctgcatgggttcgagcagccgtagtttcaccgcctgcccgtccaccagcgtttggtcttggtgtatgcaggcggctaccgtgttctttcccatagcgtaccccgtgcctaccgccgtgttgaagccgtagtttcgtggctggctgtaagcccggatgaagtcggcatcgctcatgggctgctgcaatcccgaaacggtcgtttcccggatagcctgcaccggaatagccggagtgccgataccgccgccgttctgcccggctgtcggtatttgggcaatctgtcccctttgtccgtcctgcccgttcatgtactttgctgccagctcgtaggatttttccaagagtgccatttggtcgtcagccgtaggcgtggcgttctgctgctgtttcagtcggtcggtcagttccgccacctgccgtttcaattcttctttttcctcgtccacagggggcgtttcgtagaacgtgcttaactggcggttgatgtcccggtaagccgcccttgaagaagcaccgccgcccctttgtggcttcggatcttcttccggcatcagattgatttcctcttgtggttcttccgtatcatcgtccagcgtgaaaccgaagtcctgcaaggattgtatcttgtcctgctgtttgcggcttgtcaccgcctgctcgtaagccttttgcttgtcggctataatcccgtcctctgcgggcaggggtatgtcggcattgaagccgcccacgctttccacattcacgtcctctttgccggagggtgcgaatatcagatacatgcaccctgcaaaggcaaggaacatcagcgggaagactatcattttcctgcgctgctgtacctgctgcggggtaagttcccgtttgggcttattcccctttttcggcttcccgtccgcctgcggtgcggtcgtgccgttctcattcttctgtacttcttccatattgcggtctgtttaacgggttgatacttttggttgtgtcattgccgtgcaacggcagttgtctgatgtgttctatttgcagcctttgcccctcccgtttcccgatattgtagattgatgaaacggtgatgtagatagacaagccgccgaaaaagaagaacatcaggaggataaccgccagccttttgcccggcgtaatccgtccgcacattcggcgcaggcggtcgtccgcccagtcccgcaccttttcgatgtggtttcgttttctctccataaggctatcttttaatggtctgcaaatccttgttctcggtaatggtgaacgcttcgatgatgatgccgtgccggttgttgtcgctccgtgtggcgttaagcaaccggcacgaggtgacaaggcttcgcaccgtcaggctgctttcccggacaatcaactggcgggcatacgtgttcaccttgtaggggtactggtcgaagtcgcacttcacgctgtcaatctccaccgtctgcgtgacgtttccggaaatcacccggttgtagtagcccttttccgccaagtccttgtaatagttgaaagcggtcttgtcggcgagaaacaacgagcgtttgatgttgctttcgatagcccccttttcgggtgataaggtgaagaaaagttcgtgaaaacgctgcacgtgcgacttggcttccacgggtctgttctgtgccatgtcctgcgagagtgccagcatcaggcttttgccgttgtcgaggacgtatatcttctgccgttgcttttcggcgaagctgtacgagttccacacggcgaagcccgtcaccagtgcgcacaggcagatgaataccagcgcaaagagccggatttgccggaaactcgtttcgatgttcgttaatgacttaaattccatatactaaatattgatgttggttatttgagtagtttcccggttactttcccgcttgccgcaccgaccgcagccccggcgattgaaccagcccgtgtcacgttgcggttataggcagacgtaccgccagccgacactatccagcttgccaccgttggaatggtgaagtagcccacgatgccgataatcataaagattatatacacggtgctgctcccgtccgggatgaaatccgggtctgaaagctgctcgatgtctttttggagcatcagggtttgtatgcgtgccagcacgctgctgaacaagtccgacacgggtagccacaggtaaatggagatatagcgtgaaatccaccgggtcagcgtgctttggaaaccgtcatagacggaaatcgcaaacgccagcggacccagtatgcttaacacgattaggaagaacgtccgcagcgtgtctataatcagccccgccgcctgaaagagcatttccaataactccctgaaccagtcccggacggacttctttatattataagccgtcctgtccatgtacatgcccgtcatggtcaccatgtcggagggcgaccagcccagttcttccagttgtcggtcaaattcctcgtccgatgcgaggtaagccgtttcggggcttcgcatcagggcttcatattccagtcggtctttctgtgcccggtactcgttcatgtcgaaagtctgcgtttccataagctggttgcacccttttaccactggcgacaataccgtgttgatagtccccagcacgaaagttggaaaaaacatgatgcacagccccagcgcaaagggacgcaggagcgggtacacgtctatgggttcggcacgtgcgagcgactgccacactttggcggctacatagaacaaagctcccagcccggctatccctttggctacccccgtcatgttgctgcacaagggcatcatttcatcgtacagcacccgcaacacttggtgcaggttgtcaaaatccaccgctgctaataacataggcataccgatttatatgttaccagtagcgttcatccgccgagccgtagagagccagcacccggtcggtgtcgttcttcttcttcgcccgcaggtaggacacggatatgttctttcgggtgtagtagttcacgaggttgcggtagttgagcaggcttttataggcgttgttgattaccgccagcctttcggcatccgtcagcgacatgcccgtcacgttcactacattcttcaagtcctgcaacacgtccgcactttcggagagcagcttggcgtacccggctgaaatggcggtgagttcatccggcgtgtagttcgggtctgccagcatgttctgatagtttcgcacgtagatttcggatatttccgccaccagctcaatggacttcttcaccttgatgccgcccttgacaacatcgtgtaccgctttgagcgcatcgtaatattttttaccctgctggaaaatcttctgcgcttccatgaagccgtccagcgtgttcttggcagtggtggaagtctgcactatctgcttggtggtgttgatgatgccctgcgccaagttgccggggtctgacaccacccactgtgcggatgccttgccgatgaagcaaaggcacaccgccataaggagaattgttcttttcattatcttttgttttcaaggtttgtaactcgtttgtattcgccgccgggcatgagcgttatccggtcggtctttttgtcataggtgaactgtatgcggaagcccgtttcgatgaacaggcagccgttccgttctgttaccgggtaagccgtttccagtattctgcccctgacattcgctttccgggtgacggtgtatctgccgcccgtttccgagagtgtgaaagccgggtgtcccctgacgtgtacccaatagccctgcatcctttccagctccttgtttccgctgtcctcgcagcccgccagcaggtaggcggacaatagcgtgtatatcagattgtcaatccatttcatgttcctaatttttaagttgttgatgattggggatttcttttgctttctgcaagccgcttgatagccagttcaaggttgccgtccagcttgtcggcgagggcgaacagttccattttctcgctttcctcggtcgtgtacgtgtaatattcttccaacgaaacttctgtggcgtacaccgccgattgtgtgccgcccagcgagaagaaaacttccttgtacttccgtccggggtggttcgccatgttgatagacaatatctgcgaacgctccttgtcggtcagtcccaagaggttctgtatgctgtcgaacttgttcaggtattttcgctggtctaacaatattttgcagtccgagttattgatgatactctctttcacgataggggaagaaataatatcctcaatctcttgcgtgactacaatcgcttccccgaaatattttcggactgttttgtagaggtagcggatatagtccgccatgttcgccgatgcaatcgctttccacgcttcttcaattagtattaacttccttatcccctttaacttgcgcattttgtttataaaggcttccatgatgatgatagtcgttaccgggaataaaatcttgtggtctttgatgttatccaactcaaagacaatgaagcgtttatgcagcaaatccagttccttgtcggagttcagcaggtagtcgtactcaccgccacgatagtacggttcaagcacgttcaggaaattgtcaatgtcaaaatccttttccctgacgttcttctgttcaagctgtcggcggtaatcatcccggacaaactcatagaacgtgttgaagcagggcgttaccgaacggtctttgcctatcagttcgatataggcactcacggcgtttgacaacgccacttcttccgaccgtttgggggcttcatcgtcccgcttccacagggtgagtatcagggttttgatactctcttttttctcgatgtcaaataccccgtcctcgacatagaacgggttgaacgctatcgggttctcgttggtgt

SEQ ID NO: 585 - DNA, 1149658 bp, Bacteroides ovatus
  source 1..1149658: mol_type = genomic DNA
ttaatatagattggttaacatatccattattgtttatagctgttccaatactttccagcattggtataaccctcttggtacatggaaacatcctttccattttcctcctttgagtggtagtagcacttcacctctccgatttaagtatccataccattcgggatgctctttatctttaaaatgggtccatgtataatcgtgtactttttcaaaccattccagacattggttatctccggtcaattgataactcttcagaagagatatgagtgtttcaatatgcacccaccagagtttctggtcccattccagttgttggggaggacaaccgttacgatccataaaatagtagatacctccatattctttatcccaaccatattcaagcattgtaagagtgatattcttagccttttcgattaattccggacggtttaggcgtttccctaaatccattataaaccacatggcttcaatcgcatggccaggggtaatctgccgtccttcaaagcaatctatcagattaccattcacatctacattctcaacaatgataccaccaagttcgggacgatagaagacagacataacttcatgaatacaagtatccatcgcttgttccaaatagtccttgcctaaaatatgctcaatttccatagcaagattgcatagtatcatcggcagggcaaaattttttagattacgagtgcccggatgaagtttattccatttacctttcggattatctactttggaaaggataatatcgaaggttttcttggcaatgtcagcatattcctgattaccggttgcaaggcttaattgcccgaaagccatggcagcgaatgtatatgaaaagatattgtatggttctaccaatggtctacccaaacggtcaagggaaaaataccagttatagtctccatcatgtccatatttttttaaaaactcaccaccttgaacggcacaatccagccattccttacgtttttccactttattgtaaagcatagagaacatccacacttcgcggccttgcagccagataaatttatctgtatcgaaaactcttccttcacgatccaaacaggtgaagtagcctccatattcatgatcttgtgagttttcaagccagaaaggaagaacattatccaagagttcatccttgtattgatttgccagtttcttaaaatccatacatcttttattattaagttattaaggtctttttgttttactattccgaacgggtccaatatctttcaatctcttccagcgacttcccggtagtctccggcacgagtttccagacaatcagcatatacggcacgcacatgagggcgaacaggaagaatgttccggcgggggtaaggttctggagcatccagggggttaactgtccgatcaggtacgttccgatccacagagcgaatcctgctatcgacatggccagtccgcgaaccttggtgggatacatctccgagaggagcacgaacaccacggcacagatggatacggcacagcagaatacatagaacaggaagaaaataagcaggaagaggctggatactcccagggaatctccgaagaggaagtacaggccgatgagaatcagagaaacaaccattcccgaaactccgtaataaacaagtttcttgcggcctaccttatcaatgatgacaagagccagaacggtggtcaaagtattgactagtcctaccagaacttggtaaaatgaaagttaactgtttgcatagctgtattatggtagaaaagttttatctttatcgcgttaaactaactaatacccccattatgagaagaattttttatttacttttccttgtcttattaggctattcttttgacgtaaaagcttcagacacagtgtttatccatgaaacacaaatcccggttttgatagagcggcaggacaatgttctgttctatatccggttggatgcaaaggaaagcaagatgctcgatgaagttgttttagatttcagtaaaagtaccaacttagcggatgtccaggcaatcaaactctattatggaggaacagaggccttacaagatcaaaacaaaaatcgctttgcccctgtagagtacatatccagccatcgaccgggtgcgacattggcggctaatccttcctattccataaaatgtgcagaggtcggaccatcggaaaaagttgtattaagaggtaattacaatttatttccaggtgtcaactttttttggatcagtttgcagatgaaaacagatgcctctttgcatactaaaatagtctctgatttacatgctgtaaaagtggatgggaaagaactctattgtaaatttatttccccgaaagatattactcaccggatggcagtcggagttcgtcatgctggtaatgacggttctgcttccttccgtattcccggattagtgacaaccaataaaggaacattattgggagtgtacgatgtccgatataatagtagtgtcgatttacaggaatatgtagatgtgggtttgagtcgtagcactgacggagggaagagctgggagaaaatgcgtcttccgctttcatttggtgagtatggcggtttgcctaaagcacagaatggggtaggagatccctctattttggtagatactcaaacgaataccgtctgggtggttgccgcatggacacatggtatgggtaatcaacgtgcctggtggagctcccattcgggaatggatataaaccataccgcacagctggtattggcaaagagtacagacgatggtaaaacatggtcgaaaccgatcaatataacagagcaggtaaaagatccgtcctggtattttctccttcaaggacccggacgtggaataacgatgagcgacggcacattagtatttccaacgcagtttatagactctacccgtgttccgaatgcaggaatcatgtatagtaaagaccgggggaaaacgtggaaaatgcacaatatggcacgaacaaatacaacggaagcacaagttgcggaaatagaaccgggagtattgatgctgaatatgcgtgacaatagaggaggaagccgggctattgccataacgaaagatttgggaaaaacctggacagaacacccgtcttcacgtaaggcacttcaggaaccggtatgtatggccagtctgattcatgtcgatgccaaggacaacgttttgaataaagacctcctgttgttttcaaatccggatacgactaaagggcgcaatcatataacaataaaaacaagtctggataaaggacttacctggttgcccgaacatcaaatcatgctcgacgaagcagaaggatggggatatagttgcctgacgatgattgataaagagacaatcggtattctatatgagagcagtgtggcacacatgacttttcaggcggtgaaattaacagatttgttaggaatgaaatgatagatataatagcggttaaactatccgatatgataaaagaataaaaccgtatatttatcgtggcgtgcaaaaacaacatattttgttaaattatcagtgaaatttgctgaaaaaataatatctttgaatccgttaatatctaatgccccactatgatgattaatttgatcggaaaaaaggctcaaatagcatgtgaactactatgctgttgcagtatggcatatgcacagagcaatgacaattccgaagttgtcgttctaaatacaggctgggagttttcccaggtagggacggagctgtggcgaccggcacaggttccgggcaccgttcatcaggatcttatcaaccataaacaacttcccgatcctttttatggcatcaatgaacaaaagattcagtgggtggaaaatgaagactgggaataccggactgcttttacagttacccccgaacaactgaaacgggatgacgcccaattggtttttgaaggtcttgacacatacgccgatgtatacctcaatggagcattgttgctgaaagccgataacatgtttgtcggttataccatacctgtcaagtcccaactccgtatcggagaaaaccttcttcacatctattttcattcccccatccggcagacactgcctcaatataactcgaacggattcaactatccggcagacaacgaccatcacgacaaacatttaagcatattctcccgtaaagccccttacagttatggctgggactggggaatccgcatggtgaccagcggcatctggcgtccggtgaccatccgtttttatgacgcagcttctatcagtgactatcacgtaaagcaactcgcactgaccgaccagctcgcaaatctgtctaatgaattagaaataaacaacatactctcccggccacttcaggcagaggtgagaatcaatacctcattcgaaagaagtgcagaaaaaagcatcagccaggcaatcaccttacagcccggaatcaatcatgtttccataccttccgaagtggcatcccccgtacgttggatgccgaatggatggggaaagcccgccctgtatgatttctccgctcaaatcatagtagaagataaagtcgtagccgagcaatcgcaccggataggactgcgtactgttcgcctcgttaatgaaaaagataaagacggagaatccttctattttgaagtaaatggtgtacctatgtttgccaaaggagccaattacatcccccaggatgcactcttgactaacgtcactaccgaacgctaccaaaccttattccgcgacatccgcgaagcgaacatgaatgtcattcgtgtatggggaggtggaacgtacgaagatgaccgtttctatgacctggcagatgaaaacggaatactggtgtggcaagacttcatgtttgcctgcactccctatccgtccgaccccacctttctgaaaagggtagaggcggaagcctgctataacatccgtcgccttcgcaatcatgcttccctggcgatgtggtgcggcaataacgaaatactggaagccttaaaatattggggattcgacaagaacttcccgcccgaaatctatcaggaaatgtttcgaggctacgacaaactgttccatcagctccttccagccaaggttaaggaactggatgccgaccgtttctacatacacagctccccgtattttgccaactgggggcgtcctgaatcctgggggataggagacagccataactggggagtctggtatggtcaaaaaacattcgagtcactcgatacagacctgccccgtttcatgagcgaattcggttttcagtccttcccggaaatgaagaccatctccactttcgccgctccggaagattatcagatagaatcggaagtgatgaatgctcatcagaaaagcagcatcggcaacgccctgattcgtacctacatggagcgcgactatatcatccccgaaaaatttgaagactttgtctatgtcggactagtactgcaaggacaaggaatgcgtcacggactggaagcacaccgccggaaccgtccttactgtatgggtaccctgtattggcaactgaatgacagctggccggtagtatcctggtcgagcatcgactattacggtaactggaaagccctgcattaccaagccaaacgagtctttgctccaatcctcatcaatcctatccggcagaacgacagcctcaatatctacctgatttccgactgtccagacaccaaagaccacctgatgttggaaatgaaagtaacagactttgacggaaagaaacaaggcaagcctatacaactcaacacattgacagttccggctaacacttcccaatgcgtgtaccgtataaaacccgacacctggctatcaccggaagaacagcaacgctgtttcatgcaactgacgctaaaagacaaggcaggaaacacccttgccgaaaccgtatacttctttagaaaaacaaaagacctgcttctgcctgaaacaaccgtttcctgcaagatgaaacagaaagacggcatgtgtgaactgacattgttttctcccgctcttgcaaaagatgtctttattgaaattcctttgcagggagcccgtttcagcgacaactttttcgaccttcttcccggagaacgtaaaacggtcgtcatcacttctccccaaataaagaaaggagaggagctgcctttgacaatcaaacatattcgtgaaacttataattaatctattaataacttaacacttaattttttagtttatgaagcaactctttaaattaaccggatgtctggcactagcaggactttttgcctcttgccaatcggtgcaacaggaagccaactaccagatcatccccatgccacaagaaattgtaaccgctcaaggaagtcccttcatcctcaagagcagtgtgaaaattctctatccggaaggaaacgagaagatgcaacgcaacgcaaaattcctggcagactatctgaaaacggctaccggaaaagatttcgccattgaagccggaacagaaggtaaaaacgcaatcgtactggcattaggcacggagaacgaaaatccggaatcctaccagatgaaagttaccggtgacggaatcacgattactggtcctacggaagccggcgtattctatggcatccagtccctgcgcaaatcattgcctgtggctgtcggtgcggatattgccatgccagccgtagaaatcaatgacgctccccgctttggctatcgtggcgcgcatttcgataccagccgtcatttctttaccgtggatgaaataaagacctacatcgacatgcaggctttacataacatgaaccgcctccactggcatatcaccgacgatcaaggttggcgtctggaaatcaaaaaatacccgaaactgactgaaatcggtgctaacagaacagaaacagtcatcggacgtaactccggcgaatacgacggcaaaccttacggtggattctacacccaggaacaagccaaagaaattgtagattatgcagccgaacgctacatcaccgttgttcccgaaatcgaccttccgggacacatgcaagctgcccttgccgcttaccctgaactgggttgtaccggtggtccatacgaagtatggagacaatggggtgtatccgaggatgtgctttgcgccggaaacgaccaagtattgaaattcttggaagatgtttatggtgaattgattgaaatcttcccatcacaatatattcatgtagggggcgacgaatgcccgaaagtaagatgggaaaaatgtccgaagtgccaggcacgtatcaaagcattgggattgaagtcagatcagagccacagcaaagaagaacgtttgcagagctttgtcatcaaccatattgagaaattcctgaacgaccacggacgtcaaatcatcggttgggatgaaatcctcgaaggcggacttgctccgaatgctaccgtgatgtcatggcgtggtgagaaaggtggtatcgaagctgcgaagcagaaacacgatgtcatcatgacaccgaacacctatctgtatttcgactactaccaagctaaagacatcgaaaacgaaccgttcggtatcggtggttatctgccgatggaaagagtgtatagctacgagccgatgccggcttctcttactccggaagaacagaaatacatcaagggagtgcaagccaacctctggacagaatacatcgctaccttcccgcatgcacagtacatggtattgcctcgttgggctgctttgtgtgaaattcagtggtccagccccgaaaagaaaaactatgccgacttcctgtcccgtcttccacaactgattaagtggtacgatgcagaaggatacaattacgctaaacacgtatttgacgtacaagccgagtttgacccgaatccggcagaaggaacaatggacgttaccctgtctaccatcgacggtgcccctgtttactatacattagacggcacagaacctactgccgcttcctccgtttatgaaggagtattgaaaatcaaggaaaatgtaaccctgtccgccaaagccattcgtcccaacggcgaaagcaagatagtgacagagaagattgatttcagcaaatccagcatgaagccgattgtagctaatcagcctatcaatgaacaatacctgttcaaaggagcttccactttgatagatggtctgaaaggaaatagcagctataagtcaggccgttggatcgctttcaacggaaacgacatggatatgactatcgacctccagcaacctactgaaatctcaagcgtggcaatctctaccaatgtagcaaaaggggactgggtatttgatgccagaaacctgtccgtagaaacttcagatgatggcaagaccttcaaaaagattgcttccgaagaatatccggagatgaaagagacagacaaagacggaatcgttgagcacaaactaacctttgctcctgtgaccacccaatacgtgagagtcattgcttcaccggagaaatcacttccggcatggcatggaggaaaaggtaaaaaggcatttttatttgtagacgaaatcaaaattgattaatgaatataagaaaagaataccctaaagtttgtcttttcttatggatattggggatgtgcttccatgcacatcccattctggcacagtccgtcatacctgtcccattaaaaatggagcaggggacgggctcttttttactgtcagaaaagactaaactttatacaaacctgcaaggtggagaagcggaactctgggagaattacctgaaagcattacctgttcagctgaaagaagcgagaatgaaagacaggaaacagatgcttttcttattgataacccccaagaccccccaattgccatcaccggaaagctatacactctccgtcacctctcaacgaatcgagatccgggcaacttcgggagccggattattctatggaatgcaaaccctgttacagctgatgcaaccggcaagcacaggcagctattccgtaccctctgtcgagatagaagacacccctcgttttgcttatcgcggactgatgctggacgtatcccgtcatttctctaccaaagagtttataaagaagcagatagacgcattggcatattacaaaatcaaccgtttgcacctgcacctgaccgatgcggcaggctggcggcttgaaatcaagaaataccctttactgaccgattttgcagcctggcgtacagaccccacctggaagaaatggtggaacggcggacgtaaatacctccgttacgatgaacccggagcttccggcggctattacacccaggacgatattcgtgaaatactggaatatgcccgtcagcattacatcacggtgattccggagattgaaatgccttcccattcggaagaagtgctggctgcctacccgcagctatcctgttcgggagaaccttacaagaactccgatttctgtgtcggtaatgaagaaactttcacctttctggagaatgtactgacggaagtcatggaacttttcccttccgaatacattcatgtaggaggtgatgaggccggcaaatcggcttggaagacctgtccgaaatgtcagaagagaatgaaagacgagcatctggccaatgtagacgagctgcaaagctatctgatacaccgtatcgaaaagttcctcaacaatcacggacgccgtctcttgggatgggacgagattctgcaaggaggtatcgcgcccaatgcaaccgttatgtcgtggcgtggagaagagggtggtattgctgccgtcacctccggccatcatgccatcatgacaccgggtgcatactgttatctggacagctatcaggacgccccgtactcccagccggaagctatcggtggctacctgccattgaagaaagtatatgcctacgatcctgtccccgcttccttaactgcggagcaggcaaagttagtctatggtgtgcagggtaacctatgggtggaatatatccccactcccgaacacgtggaatatatgatttatccccgtatgctggcattggcggaagtagcctggtcggctccggaacgtaagtcgtggcccgatttccatacccgcgcactgtcagcagtggccgatttacagaaaaaaggataccatcctttcgatttgagcaaagaaatcggcagccgtcccgaatctcttcaaccagtcagccatttggcgctcggtaaaaaagtgacctataactcctcctatagcccccattatcccgcacaaggcaacacagccctgacagacggcatacgtggtgactggacttacggtgatggttcatggcaaggatttatctcggacaaccgtctcgatgtgacgattgatatggaaaaagaaacccctatccattccatcaccgccgcttttatgcaagtggtcggcgcggaagtattcctgccggagacagtgattatttccatttccgatgatggaattaacttcacggagttgcaaaaacaacactttgaagtgagcaaagaaacccctatccggtttacggatatttcatggcagggagaagccaaaggaagatacgtacgttaccaggcacaggccggaagcgaattcggagggtggatatttacggatgagataatcgtgaaatagacattgtcaatatcatttatgaataaaagagggaatctattcaaccagattctctctttttttgttatatttgtattattaccttaaaaactaagaatatggtacaacacgctagactcattttctacacccttcttcttctggtaatcccgtgcgagagcaccttggcgcagaagattcccgtcacgcccatagactcattgataactgttggatatgccaccggaagtttgaaaaccctctccggttccgtagagaagattacggagacacagatgaataaagaccagataacgaaccctttggaagcaatccgcggacgtgtgccgggcttgactatccaacgcgggtcaaatggtccggcagccttggatgcagtacgcctgcggggaactacctcactgaccagtggcaatgaccctttgataatcgtcgacggagtatttggtgacttgagtatgctcacctccatttaccctacggatattgagagcttcaccattctgaaagacgcttccgaaaccgcacaatacggttcacgaggagcttccggtgtgatcgaggtcaccactaaaaaaggaatgagcggcagaacacaggtagcctacaacggtagcttcggaatttccaccgtctacaagaatctgaaaatgctgtccggcgatgagtaccgccgtgtcgcctcggaacgcgggatttccattctggataaaggaaataacaccgattttcagaaagagattgaacagacaggactacaacaaaaccatcacatcgccttttatggcggttccagtgagtccagctatcgcgtttctcttggtttcatggatcgtcagggagtgattctgaatgaagacatgaaaaacttcacttcgaatatgaacatgaatcagaaaatgttcgacggcttcctgaactgcgagctgggaatgttcggttccattcagaagaatcataatctggtggattatcagaaaacgttctattcggcagccacattcaaccccacctatcccaaccataaagaccccgtcaccaattcttgggatggaataacgaccgccagtcaaatcaccaatccattggcatggatggaagtgcaggacgatgatgccacttcgcacatcagcacgcatgcccgtctgactttcaatctactggaagggctgaaacttaacctcttcggtgcctatacctataatatcgtggaaaattcgcaatacctccccacctccgtctgggcgaacggccaggcttacaaaggaaccaaaaagcgagaatccttgctgggcaacatgatgctgacctataagaaaaactggaaaaaacatttctttgacgtgttggcacttgccgaacttcaaaaagaaacctacacgggatattatacaacagtaagcaatttcagcaccgacaaattcgggtataataatcttcaggcaggcgcactccgtttgtgggaaggcactaattcttactacgaccaaccccgtctggcatccttcatgggacgtttcaactatacatacgccgaccgctacgtactgacgctgaacgcccgtacagatgcttcctccaaattcggggcgaaccacaaatggggattcttcccctccgcatctgccgcatgggtgattagtgaagaagaatttatgaagcagttgccgatggtggataatctgaaattccgtattggctacggtctggcaggtaatcagagtgggattgactcatacactacattgaaccttgtaaagccgaacggtgtagtccccgtcggaaactccgccgtcgtatctttaggagacttacggaacacgaatcccgacctgaaatgggaagtgaaacatacctttaataccggtatcgacgtagctcttttcggcaaccgcctgctgctttccgccaactattacaactcccgaaccacagacatgctttacctttacaacgtaagcgtaccgcctttcacctataacaccttgcttgccaacatcggttccatgcgcaactggggtacggaaatcgccatcggcatcacccccttgaagaccaaggatatggaactgaatatcaatgccaatatcactttccagcgcaacaaactgctctcattaagcggtatgtacaacggcgaaatgctttctgctcccgaatataaaagtcttgctggcctcgacggagccggctttcatggaggatacaaccacatcgtatatcagatggtgggtcaaccgttgggcgtgttctatcttccccacagtacgggactggaatccgacggaaacggcggatacacctatggcatcgccgatctgaatggcggaggtgtcagccttgaagatggtgaagaccgctacgtggcaggacaagccgtacctaaaacgattcttggctccaacatcagtttccgctacaagcgtttcgacctgtctttgcaggttaacggagctttcggacataaaatttacaacggaacctccctgacctatatgaacatgaatatatttcccgactataacgtaatgaagaaagccccgaaacagaacatcaaggatcaaaccgccaccgactattggttggaaaagggagattatgtcaacttcgactatgtgacgctgggttggaatgtgccgattgagaaagtgcagaaactgaagaaatatgtccgctccctgcgtctggcatttacagtcaacaacctggcaaccatttccggttattcgggactttcacccatgattaacagttcaacagtgaactccactttaggcgtggatgataaacggggatatccgttggcgcggacgtacacactgggattgagtattaacttttaatggaggaggagatgatgaaacaatatatgaaaaataaaagtctttttttgcagaaagaagaactgctttcaaggatagcggaactgttttcaaagaagatcttacgtccttcgggagtgctggtattccttcttataacgtgcctgggtttattctcatgtagtaagtttttggaggaaaatccgaaagataagttacccgaagatgacgtttacaatacaatctcggaagtatatctcaatgcagtagcttcgctttatacatacgtaggcggttatagtgatagtcagggattgcagggaacgggtaggggagtctacgacctgaacacctttacctccgacgaagccattatccccacccgtggaggtgactggtatgacggtggtttttggcaaggactttacctgcacgattggggaatagagaatgatgccattcaggctacatgggaatatctctataaagtcgtcatgttaagtaacaaatcactggaacggatagacaaattcgccgaaactcattccgctacggaactgccggcataccgtgccgaagtacgtgccatgcgggctatgtattattattacctgatggatttgttcggacgcatcccgctagttcaatcctcttccgtagcaatgaaagatgtagtgcaaagtgaacgaaaaacggtctttgactttgttgtcaaggaattgcaagaggcggctcctttgttgagcgatgcacatagcaaccagtccggcccttactatggccgtatcactcgccccgtggtaactttcctactggccaaactggctttgaactccgaagtttatacagacaatgattggacggacggacaacgcccggatggaaaaaatataaagttcacagtgaacggcagcgaactaaatgcctgggaaacagttatctactattgtgaccaactcaagactatgggctacaaactggaaccggaatacgaaacgaatttctctatattcaacgaaccgtccgtagagaatgtcttcactatcccgatgaacaaaactctgtacaccaaccagatgcaatatctcttccgttcccgccactataatcacgccaaggcttacggactaagcggtgagaacggtcccagcgccaccattgaagccctcgaagctttcggttatgaaaccgcggaacaagatccccgttttgatatttgctattttgcaggaattgtccacgacctgaaaggaaacataatcaaactggataatggaacggtactggaatatctgccctggaaagtatctctggatataacagataccccatacgaacaaaccgcaggagcccgcatgaaaaagtatgaagtcgacccgactgccacaaaagacggtaagttgatggagaatgacattgtattgttccgctatgcagacgctttgttgatgaagagtgaagcgaaagtccggaacggagcaaacggagatgaagaactcaatgaagttcgtagccgtgtcaacgcttctccccgcactgccactttagagaatatccttgccgaacgtcagctggaactggcttgggaaggatggagacgacaggacttagtccgcttcgggaagtttacaagagcttacagcagccgtccgcaactaccggatgaggcaagtggatatacaactgtattccctataccggagaaaatacgggtgatgaatgagaggttgaaacagaatccggggtattaggaagaagatagtagtaatcaaaataaaaaatcctcgattttcatccggagaatcgaggatttatattatttgttgcagcacttgtagagataatagctaatgcagaaatccatattatatgtagtgtggttattactcgatccagtcgaataactcaattaaatcgaattacccaatcaaatcgaaatcatatttttcaaattcactcccattgattattatagcaatttgatgaagcccgagatggaattttctcgttgtaaccacacggaaagagtgctttcgcgttattcgtgtggtagaattcccggcatattctttttcgctgattttatgaactttcttcgtcagcgttccatttgctttttggtaataaataccatattcaagccgtattttgattgtcttattgctatgattcaacaagttaaaaccaaactccaacgaatccccgactttaaccttaggacttgaaatctgaaaatcctccacactaatattatttctgatagaatcaaagccaaacaactccatcacctctggaatcccttgttttaagagcgtccggcaaccgtgtttaataatccagtctacctctttcgattcccccttccatttctttgccaaatcaatgacaatttccggattatctttcgcaatatcattcaaattattggcaacgctcaaccgtacaaatcttgccggatcatttttaagattctctaaaataggaataataggtgtcgggtctttcttcagattcggcaaagccatcgcccaaggcaaacgcggacggcaaccttctgacgaaagccgccttactccccaatgctcatgtttcgaccaaaccaacatctgcttcatcattttatctggatattttattataaaaggatgagtcacaaattcgcaacttgtgaactgtgtgattttctctatcgccttgacagacgtttcataatcatccaacccatattgctcgacataattatccagaatcgccccatactccagcatcaatccaaacttcgtatcatctattaccgaaaaatcaggccgcgtactttttacatgatccaacaactcaagaatcttagcgattgcctctttgtaatctgccggcaaaaactttttcagaatggtagtgatatgtatgcagcgctgtttaagttccctgccttcccattcatcatccataacttgagaaacaaacccgtgagcatcaaaatcatcgataacaagttttaaatctttcgtaaataggtcgaaaaattgcttgttgtacatattcttaaaaggttctgccatacttgatttatatattttagttagagccccgacttattggatatattgttcaataatactatatctttcctttaaagaatcaatatgcttcacctctccttcggtcattcctttcatattaactccacatttctcgcaaaaggacgaatcaacaggatttttatgtccattttcgcatatatacttctcgccattatctcttgtaaacacaccgccttttacaacttctatttttcccgtatccggcaggctgtttaaacactctaatattgttttcatccattttaaatccttggcatcataagaattctttgttgctgacaacaatctcaccccttcgtggatttttcctttcactattgtttcatatatagactcaccatcaaaaagacagcactcctttattagaattcttatctttttgtgttcaatatgctgatagataacgggaatgacgaaatcaggaggagtggcagataaaacctgtttgatgttagccgcctcttccgcataataatcgagatctatggagatatatctttttataagactttctattatctctgtttgcggatattccagtaaaaactctacccattcggaagtcaaaggtaccgcatcttttatttgagaaataatataccgcctgtctatttccttttgcaaatcagattgactgatggatgtacgaatgatctcctcttcagataattctttattattcatttcaatgatacaggccgttccggaaacagaaaccataaacattgatttatccttaccggaaatttcatcaaaatcgactctgaaaccaacaatcgcatttgcacccaagtttaatgctttttgtttcaatgcctttgatgcttcgccgtatataatttccaattttcttctatacgagtcagaacgtccaccaaaaaagtcagtgaatgatgcagcaaaatcggagaatatattggtacctatcacgatattggaacagatggtatctatatatttttttataggacaaccctctattgtgttagtcgtggacatgataaattcgtttctcataatatgaattttaaagtgttagtctttattttatgtcgctttacgtccatttgtttgctacacaaatatatgtctttttttttaaaaggacaagccctaaaaacagaagtgagccacaaaaaagattgcagctcacttataccttatatattatagcaaaaaattaatcgaagaaactcttgaacttcttgaaaatcttctccttcaccgacgtgttaggtttgaagttgtccgaagcctccatcttttcgagcgtgctcttttcctctttattgagcgcttccggcacatagatactgatgttgacgagtaaatcccccgttccgtacccgttcacattcggcaatcccttgccgcgcaaacgaagcaccttacccggttgagtacccgaatcaatctttactttcactttgccgtcgatagtcggaatttccacagctccgcccagagcagcagtcgggaaactaagcaacagattataaatcaaatcattctcgtcgcgaatcaagtcctgatgcggttcttcctctacgagaatcagcaagtcgcctgccacaccattgtgtttgccggcatttcctttgccacccatagaaagctgcataccctctgccactccggcagggattttcaccgacaccacttcttcaccgtaaatgattccgtcgccaccacacttcttacatttgttcttgataatcttaccctcaccgccacaagtagaacaagtgacgcgagtctgcatagtgcccagaatagtctgctggttacggatcacggagccgctacccttacaagtaggacaagtctccgaaccgccgtcaccttcggcacccgtgccatgacactggtcacacggcacatattttttgagtttaaatttcttttctactccggtagagatctccttcaacgtcagcttcactttcacacgaaggtcactgccgcgataccggcgttgctgtgaaccgccaccgccaaatccgctaaaccctccgaagcctcccccgaaaccgccgccgcggccaccgaagatgtcgccaaacatagagaaaatgtcatccatcgacatcccctcgccaccgaaaccaccgaacggaccgccattgcctgccgcaccgctcactcccgcatgaccgaactgatcgtaacgcgaacgcttttccgggttactcaacacgtcataagcctcggccgcctccttaaatttctcttccgcctccttatcccccggattcttgtcagggtgatactggattgctttcttacggtacgctttcttaatctcctctactgtggctgtcttcgtcacctccaatatttcgtaatagtctcttttttctgccatgcttctttaaaaattatgagttttatgggttgcgaatccttattcccctactaccactttggcgtggcgcaacactttgtcgttcagtgtataccccgtctgcacacaatccagaatcttacctttctgtgcttccgacggtgcggggattaccgcgatggcttcatggaaatcagtatccagcggttggtctttcgtctcgatgactttcacaccattttgagccagaacagccataaatttattgtaaatcagttccaccccttcttttacggcattgacatccgttgccgtttccatcgtcttgatggcacgttcgaaatcgtccactaccggaagaatactgccaagactcttttcgccaccattcaggatcagttcggccttctcctttaaagtgcgtttacgataattgtcgaactcggcagacaggcgcagatatttatccttttgctcttcaagcgcttcttgagccttttccagttccttttccaactcctcttcatgagtcagcggagcggttccctctgcttgttcgttttgcggttggtcttccgcaggattgtgagtttcctccacattcagttcctcttccttcacttttttttctttcggatccatcttggtatttactattttattatttactatttagaaacacacgttatctatgcaagataccgcttataaacataccggactgaccggatgtcacagatttcgtctgcaaaaactttgccaagttggccgttttgccaaaaaacgcagcaaaggtaacacttttatgtcagattggcacatatcagatagctcataattcattttaaatgtctacctttgcacgctcaaatagtaaatagtaactagtaaaatagtaaataataagatgattacagtttcgaacgtatcggttcagtttggtaaaagagtgttatttaatgacgtaaacctgaagtttacgagtggtaattgttatggtattatcggtgcgaacggtgcgggaaaatctacgtttcttcgtacgatttacggagatttggacccgacaacaggtacgattgcgctcggaccgggcgaacgtctctcggtgttgagtcaggaccacttcaagtgggactcatatactgtcatggataccgtcatgatgggacataccgtgttgtgggacatcatgaagcagcgcgaagaattgtatgcaaaagaagatttcacagacgaagacggactgaaagtatccgaattggaagaaaaatttgccgagttggacggatggaatgcggaaagcgacgcagccatgctgttgagcggactgggcgtgaaagaagataagcattacgtattgatgggtgaattgagtggtaaggaaaaagtgcgtgtcatgctggcgcaggcattgtacggaaatccggacaacctcttgctcgatgagcctaccaatgacttggatatggaaacagtgacctggttggaagaatatcttgccaacttcgagcataccgtattggtggtaagccacgaccgtcacttcctcgactctgtatgtacacacaccgtagacatcgactacggaaaaatcaatatgtttgccggtaactatagtttctggtacgaatccagccaattggctctccgtcagcaacagaaccagaaggcgaaggctgaagagaagaagaaagaactcgaagagtttatccgccgtttcagcgcgaacgtagcgaagagcaagcagacaacgagccgtaagaagatgttggagaaactgaacgtagaagaaatcaaaccttcttcacgtaagtatccgggcatcatcttcactcccgaacgcgagccgggcaaccagattctggaagtttccggattgagcaagaagacggaagaaggcgtggtgctcttcaacgacgtgaacttcaacgtagagaaaggtgacaaggtggtattcctgtcacgcaatccgcgcgcgatgactgctttcttcgaaattatcaacggaaacatgaaacccgatgcaggtactttcaactggggggtaaccatcaccactgcttacctgccgctggataacactgatttcttcaattccgacctgaacctggtagactggttgagccagtttggagaaggcaacgaggtatatatgaaaggcttcctcggccgtatgcttttctccggcgaagaggtattgaagaaagtaagcgtactctccggaggtgagaagatgcgttgtatgattgcccgtatgcagctgcgcaatgccaactgcctcattctggacactccgaccaaccatctggacttggaatctatccaggcattcaacaacaacctgaagacgtacaaaggaaatatcctcttctcgtctcatgaccacgaatttattcagaccgttgccaaccgcatcatcgaactgacaccgaacggtatcatcgacaagatgatggaatatgacgaatatatcacttccgaccatattaaggaattgcgggcgaagatgtacggagacaaataagtgaccggacgaataaaagcccctgactcccatacatgaagtctgatgaataaccaatttaacagcaacctattctcaacaatgggttgctgttctttttagcactatggaaataaaatattttgaaaacagagaagattggcgaaaatggctggcagacaactttgaaaacgccaatgacgtttggtttgtattcccctccaaatcttcgggcgaaaaaagtgttacatacaacgacgctgtcgaggaagccctttgcttcggatggatcgacagcaccataaaggcgctcgacaaagaacataaaatccagcatttcacacccagaaaccctaaaagttcctactcgcaagccaacaaagagagactgaaatggttgctggaacataatatgattcaccctgatagggaagataatatacgaaaagtattgtcagccccttttgtcttcccgaatgatattatcggaaaactgaaagaggataaaacagtatgggagaattaccaacaattttccgatgcgtatagacgtatccgaattgcatacattgaagctgccagaaaacggcccgaagaatttgaaaagcgattgaacaacttcatcaataaaacgaaggaaaataaaatgataaaaggatttgggggaattgaaaaatactactaatccctatgtctgtaattgtaactttgattgcaataacaggacagaagcattatgcgcataattgatattcaattctctttctcgaacgtagttatttttctgcccttcacctttcttccagattcctgataaatagtgtgtttacgggtgaaggggcgctcttacaccgtctttttaccgtaagcgtctccgcgattctatatagtgtattaaaataaaaaggctaatgatccctttttagtcattagccttttcccatctgtcaggaagcagttccctgtatttttcaattggtgtgttcggttgccattcggctgttctgtttatcacatccgtgagatactcaaatagattcactttatgcatcctacaagtgagtgctatcgtatagagtatggcgcctcgttcggcccccttatggctgccgaagaacaatgagttttttcttgataaggatatgtaccggttcatccgttcaaccatattgttgtccagataagtgtcaccataattaaagatgtccaccactgcattccactcattgcgaagataggtaatggcttcctgcagttcgctcttaggtaataaatccccccgttcttctatttcatcaaacacatcttttatttctccgagtatgtccggcgcatatttttttcgatgcataagattctgttctaccgtccatccctcaaccccaactttatgcttatgctcgttttgataaagtgcgtttatcagctccacgatcctttttgcatccgggtccttctcaccgcaatctataaattcccgttttatatgttgcaagcacgggatgcgtgtgatattgggataagcatcgctttcgagcttccggtaaggtgagtaaccatcgctttgtatgatacctttgcaactgcctaattcgttaagaataactctttcagaccgggagccgtcatcatagagcaggtatatcatcctggtgtttatgccgacaaccacccaaaggtatcccttcctgactccttttcccttgctgttcttttccgggacgagtattttgtaataggtttcatcggctgccttataaggatcactcaaagctgtctgccggatgcacttataaagattttcgaagaggtttgaggctttctctatcaacttatgagccgtaggtttcttcagcgtaaagccatgactctcgaagtagttgatgattctttcaacaggtagcgattgtatataacgtaattccatcaatccggcaataaatgaaccgtcatagctggaattcaagaaggccgaagccggtgtttttccctcaaacaggcgaccttcttgcgtataggtgtgtatcttgtagacatgcttgatgaagcgcatgggtacacattcatagcggacgcatattctgggaacagtggtaaacaaccgggccttattgatgtcaaaatcggaatcatcgggataaacgacatgttcttcttcctccatctcataatgcatgtcacgtttggccccattattctttcttgctttacgcttatctgctttttccgcttctatcttctgccgctcttcttcggatatggcagattggggagcctgttgccgttcggatgtgttggatacaagtttggcgagtcccttagtaaggcgctgttgcttgctaagagattcgcctttttgaaggagtgcctctttaagggaagaaacctcctttatcaaagcatctatttggtccaagagtctgttgttgtcatctcgtaatcccttgatttgttccttcaataactctatgatctcatcctttttcatggcataaagatataaaaaatcaacgaattggccaaataaaccggatgatatctttagcacaaataactaataatcagaatgttgaattagatcctgaaacgttttctcaaccgtacagactttaatgacactccatttaagataaaagacaaaacctgataagagatctcgtaattgcctgtattggggttaaatgtcggtaactcaaaacttccaccttcgaggcgcttgtagtacagaagaaagccatcgccatcccaacgcagtatttttacactttgtcggtttttaccaaagaataaaaagatatctccggaaacgggagacaagtccttcatttccgatcgtataattttgaataaaccgtcaatgccaaggttcatacgaacaaagccctggtacagatagtatcgattggctgatgttagagaatacatggatctccctcctttctttcgtaatcgcgcaacattttaataacaccaccgggtgtggcccgtttgaccgaaatggtggttccactgttaaaggtgattgtgatcccggcaagactaaactcttcttccgacaacatggcgggtgctatttgagtgaatgaaggagaggaagttgtcggttgggagggttcaacgccgccataataatcacggaccacatctgccttggcttgtttaacgctatagccccgtctggacatccaggaactcataccaccaaaagtggtatgctgatcgcggcaaacatcggctaaagaacaattgtagtctactttcaatacttcaaggaaatgtttccaagtttttccaaatcgattttctgctaaatccataatgcttcatttttatacatagcaaaaatataagaatgaaaaaagggcgacaagatagaatcgcggagacgcttacatatgcaatacgatgaatgtaatgatgaaaaactctaccttcacccgtagagagcttatttatcaggagttcagaagaaaggtgaaggagaatagagaaatgagttttttgtaggagaagtgtgaaacttcttttagtataagtaaaaagtatagctttagagaacggaaagcttagctttaggtgggcaaaagctatgctttaggaagaggaaacaatctatatgtgaaataatcatgaatatattcattctgcttaaaattggccaaaagcatgtttcttttaaataagaaaagggctgtttttagtaagttgaagttttagacagccctcaattcttttatttcttataaaccaacttgctcggaactccctccccgaacaaattatcacctagcgtcgtaatcttatttccggtagccaacacatagcggagattatcgcatcccataaaagcaccgaactcaatagccgttacactggccggtaattccagcgtgccgcacaagcgaccgcaattactaaatacacgctgtccgattgatttcaggttatgaggtaatttcatattcagcagatacttcttttgcgagaaagtgaagtcggggatagccgttgcattcgtcttggaaatatcaaccgatacgagattcggcatataatcacggataagtttgaagtcagcgttatccagtttcccttcaacggtcaggaagttgatgtctctgggttgcagtccggctttcaggatctcttcttccagtttacccattgcccccacttgcagggtagtctctaccggttcgccttcgataaaagcaaaattctgccatctgtccttgtagcggtaagagtcgctgcttcccagagggacgaagatggcggtaacgctgtctgccaatgcttccggcaacaggttgggagctgtcttcttccggatctgacagattttcagattctcacaacctttgaaggcggcatcctctatattcttcgttttctccgaaagaatcactttctccagagtggctttacctttggtcactccgcctaccacattcgagaaagcataggcagggatgaagttcggcatataaatgtagaattttccattgggataagtaccggcttttccgctgtacatcttgatttctgcgttcgaaatatccaatactttcagattggcaaattcgtcacggagatgccggaagtcctctgcattcagttttccggtcagtgtgaggtgggtgacactgttggcttcctcttcagtcatcatggaaatcagcgtaccgggcttactcacataatacgtcttactcacttgggcggcggctcctaatgcattagcggccagtaagaaacttatcaatagtagtttaattttcataattttgtagatttgttctgacaaatataggaaaaatagagaatacatgatgtttttttatgttttatatctaattttgtagccggattaacaaattgtaaaaatggaggcagacaacatagatgggaagaaagaacccaaaagacttcctgtgtgggcatgtatctcgctgtttattgtggtacttttcatatttattggattgtatgggacactggttagcggaggcttgtcgttggttcttggagtggaggctcgtcatccgggagtagtagggtatattttcgtggaggccagtatgcttttggctgttcttactgctgccgtaatcttgcttcgtctcgaacgtcgtccgttttctgatttgggactttctttaaaaggacatgccagtggactgtggtatggacttctgatggcaatcttgctctatttgctgggtttcggaatctctgttgttttgggagaaatagaagtcaccggttttcagtttaagccgttggatttattggggtcgtgggtgtttttcctgttagtggcgttgtttgaagagattctgatgcgcggctatatcctcggacgtctgcttcatactaatatgaataaattcctggcgctcttcatctcgtcggcattattcgcgtttatgcatatctttaatccagaaatagctttcctaccgatgcttaatctcttacttgccggtatgttgctgggtgcttcctatctttatacccggaatctgtgtttccctatctctcttcatcttttctggaattggattcaaggtccgattctaggttatcaggtgagcggaaataatttcacgacgagcatgctgactttgcgtatgcccgaagaaaacgtactgaatggcggagccttcggttttgaaggctcgctcatttgcacagtacttatgattgtttttacgattctgatcgtgtggtggggagaaaaaagggaagcaatcagtcttgctgtaccccgatcatactaagctgaatccgtttccggtcataatctacattcatcactctgaccatgacgtgttgatggatggataccacttccgtcggatcggaaatgaaccgttccgctaattgcgagaggtgcaccagtccgttctccttaatacctatatcgacaaacgccccgaaattggtgatgttgcctacgatgcccggaagaatcattccttcgcgcaaatcggctatggtgcgcacgttcttgtcgaattcgaagactttgatagccttacgcgggtcacgtcccggcttgtcgagttcctgcagaatgtcctgtaaggtgggcagaccgacggtaggggtgatgtaggcggagatgttaatcttccggcggagttccttgtcggctatcagttcgtcgatggtacatttcaggtctttggccatttgctctacgatgtggtagctttccggatgcacggcggtgttgtccagcggattcttggctccggggatgcggaggaatccggcacactgttcgaaagccttggcacccatgcgaggaactttcatcaactctttccgtgaaccgaaagctccgttttccgcccggtagttgacgatgttttgagccagttgcggtcccagtccggagatataagtcaatagatggctgcttgccgtattcaggtttacaccgaccaggttcacgcaattctctactgtctgatcgagcgcttttttcagttttgtctggtctacatcgtgctggtattgacctacaccgatggatttaggatctatcttcaccaattctgccaacgggtccatcaggcggcggccgatggagactgctccccgcaccgttacgtcataatcgggaaactcgtcgcgggcaatcttcgaagccgaataaatggaagctccctgctcactgactacaaacacgggtatctgacggtcgaagctttggctgttgatgaaatcttctgtctcacggcttgccgttccgttgccgatggaaatggcttctatctgataggcctcaatcatcttgcggagtttggaagcagcttctcctgttttgttcacgggaggatgcggatagatattctcattatgcaacagattgccttgtgcatcgaggcagacaactttacatcccgtacggaatccggggtcgatggcgagcacccgtttttgtcccaatggaggggcgagaagaagttgacggaggttctcggtgaatacccggatggcttcctcgtcggctttttctttggattgagcggcaaattctgtttcgatggagggcttgagcagacgcttgtaggcatcgactgtggcttcgtccacctgctggctacactcgttgttgccacgtacgaactgacgttccaggcgttcgatgcaggcctcgtcgtcgggattgatagacactttcagcaccccttccgactctgcccggcggatggcgagtagacggtgggacgtgcaacgtttcagtggctcggagaaatcgaaataatcgcggtatttcgctgcttcttcctcttttcctttcactactttggcactaatctctgcctggcggctgaactgattacgtaccgtgttgcgggcacgttcgtcctcgttcacttgctctgcaatgatgtcacgggcgcctttcagggcatcttccacatctttcacgtctcctttcacgaaggaggcagccttggtactaagattgttttccctttgcaacatcaggatggtggcaagcggttccaaccctttctggcgggctacttcagcacgtgtcttccgcttgggtttataaggaagataaatgtcttccagttccgtcggattccaggtgtcgttgatacgtttctccagttcggcagtcagttttccctgctcgttgatggtgccgagaatcgtttctttccgtttggctatgtcgcacaacttatcgtgttgctcttttatttgctctatctgcacttcatccagtccgccggtagcttctttacggtaacgactgatgaagggaatcgtagcaccttcacccaaaagatggagcgtactacttatttgtctttccggtatacccagaaaaccggaaatcatcttgtgaaataattccataatttgtattttttgagagtaaatgagcgacaaaaatacatataaatctgctaaacccgacaagttttactatatttgcaactcaattaatgaattaacacatcaaaactgcataattatgctgggatgtcttggatatctttttatctgtttcctttggcttctgcagtcaacggaagtattggctgtctctaaagataagaaacctattctgattatttgctcttataatccggcagcacaccaaacctcggtcactatttccgattatatggatgaatatagtaagttgggaggacagcgcgacattgtcatcgaaaacatgaactgtaaaagtttctcggaggctccgttatggagcgcgatgatgacgcagattctggctaaatatcagggagaaaagcatccggcacaaattattttattaggacaggaagcgtgggctgcctatttgtcgcagagggatgaaatgcaggtgaaagtgccggtgatgtgcagtctggccaatagtaatgtggtgatattgccaaaagatacggtggaaaaccttgattgctggatgcccgaatctgtcgatatctttgaagatcatctggatattcccgaactggaatcgggatttatcaatcaatataatatagaaggtaatatctccatgattcaagctttctatccgaaaacgaaacacattgcctttatctcggacaatacttatggcggagtgactatgcaagcgttggtacgaaaagaaatgaagaagttccccgatctggatttgattttgatggacggccggagacattctatttataccatcgttgaggaattgagacagctgcccgaaaatacggttattctggtgggaacgtggcgtgtggatatgaacgaggggtatttcatgcggaatgcgacgtatgccatgatggaggctactcctaccatcccggcttttactccttcatcggtgagccttggatattgggcgataggaggagtgctgcccgattatcggaaagtgggaggagaaatggctatggagtccatacggatggatcagcacccggaggatacggggaagcatctttcgatcattggctctaaagcggtattggatagccggaaggtgaaagagtgggggctgcacccaagcgtgttgccttttaaagtgcagcttgtcaaccaaccggtttcgttctatcagcaatatacttatcagatatggtctgcttgtgctttgttcgtgattctggtacttggcttatgtatctctcttttctattatttccgtacgaaacgtttgaaagacgagcttctgaaatcggagaaggatttgcgtgtagcgaaagacagggcggaagagtctaatcgtctgaagagtgctttccttgccaatatgagtcatgagatacggacgccgttgaactcgattgtcggcttttcggatgtactggcaatgggcggtagcacggaggatgaacagcagtcttattataagattatcaaaaccaattcggatttgttgcttcgtctgattaatgatattctcgatctttcacgtctggaggcgaaccgggtgactttgacgtgggaggaatgtgatgtggtgcagttgtgtagtcaggtggttgcctctgttagtttttcacggcagtcgtcggacaatcagttcttgttttccacttcttttgaaactttccggatggtgacggatgtgcagcgtatgcaacaggtaatcattaatctgctgtccaacgccgacaaatttacgaaacgcgggaagattaccttggacttttctgtgaatgaggaaaagcaaatggctattttctcggtaacggataccggatgcggtatcccgaaagaaaaacagggacttgtgttcgagcgttttgaaaagctgaatgagtacgcccagggaaccggattgggattgtctatctgtaaattgattgtgcataaatggagaggaagtatatggatcgatcctgactataccggtggggcacggttcgtattttcgcatccgctaaatatagaaaaagaatgaaacgaataggatttatttatggcttgcttttctgtctcgtactgtctgttgcggcgcaggaaaaggtggtgaagctgaagattgtggaaacgagtgacgtacatggtaattattatccttacaattttataacccgccacgagtggaagggtagtctggcacgtatttattctttcgtgcagaaagagcgtgaacagtataaagagaatctgatattgctggataatggtgatattttgcagggacagcctactgcctattactataattatatagatacggtgtctcctcatctttgttcggaaatgatgaatttcatgaaatatgatgccggtaatatggggaaccatgatgtggaaacgggacgtgctgtgttcgaccgttggatagccacttgtgacttccctgtgttgggtgccaacatcattgatacgtctacgggaaaaccccatctggctccttataaggtgttggaacgtgatggcgtgaagattgtggtattgggtatgattactcctgccatccctgcatggctttctgaaaatctgtggaaaggcttgcgtttcgacgatatggaagagacggcacgcaaatggatgaggattatccgtgaaaaagagaatccggatttggtgatcgggttgtttcatgccggacaggaggctttcaaaatgtcgggcaaatacaatgagaatgcttctcttaacgtagcgaagaatgtgccgggattcgatatcgtgttaatggggcacgatcatgcccgcgaatgtaagaaggtgatgaatgtagccggagattcggtgttgattatcgatccggccagcaatggaattgtattgtctaatgtcgatgtgaccttgaaactgaaagatggaaaggtgcagagcaaggacgtcaaaggggagttgacagaaacggaagcttacggaatcagcgaggatttcatgaagcgttttgctccgcaatatgagacggtgcagaagtttgtatccaagaagatcggcacttttaccgagagtatctctactcatcctgctttcttcggtccttctgcttttattgatttgatacatactttacagctcgatataaccggagctgacatctcttttgccgctccgctttcgtttgatgcggagataaagaaaggggatgtgtttgtcagtgatatgttcaacttgtataagtatgagaatatgctgtatgtgatgacgttgtccggaaaggagattaaggattttctggagatgtcttattatatgtggacgaaccagatgaagtcaccggaaaatcatctgctctggttcaagaagaaacctcgggaaggtgcggaagacagggcttctttccagaacttcagttttaatttcgactcggcttccggcattatttatacggtggacgtgacaaaaccgaagggagaaaagattacgattacgagcatggcggacggttctcctttccgtatggataagatatataaagtggccttaaattcttatcgtggtaatggtggtggagaactgttgacgaaaggatcgggtattccgcaggaggatttgaaggaccgcataattttctctacagataaagatcttcgtttctatttgatgaattatatcgaaaagaaaggtacgatgaaccccaaagccctgaatcagtggaagtttgttccggagaaatggacagtgccggctgcccaacgtgattctgtatatttattccggtctgttcaataagtaactaaaagtgttcattatgtctgataatactcttgaacggcttgtatatctgattaaatgctggtatatttgtcgcaaaaaagagagagtatgtatattcaaaatgttcccaaagtaggtatttcttcggtagttcattctaaacatatagattctggcaacattgatgttgttgataatgatatagcgctcttcgatacggagagcgttatatcgttgtataatggaccgactaaactggaggtgttgacggtaggtctttgcctggaaggtactggtacttttaatattagtttacgtgagttccaactgttccccggattaatggtgatcgcgctgcctaatcagattgtcgaacagcggtgtttcagttccgactttaaagcgatattctttgctgtgtcgaagaacttgttggagacattgcctaagatcagtaatgtgctttccttattcttttatctgaaagattacccgtgtttcaatcttacaccgcaggagcaggagactgtgaaggaatatcatgcatttatcagaaaacggttgaagaataaggaggctttatatcgtaaagaagtggtaatgggcttgatgcaagggttcttttttgaactttgtaatatctttaccaatcatgtgccagccaatgctactaccatgaaaaataaaagccggaaagaatatattttcgaacgtttttatgagtctttagtggagtcttaccagtctgaacggagcgtgaaattctatgctgaccagttgtgtctgacgccgaagcatctttcgggagtagtaaaagaggtcagcggaaaaacggtgggggagtggatagacgaactggtgattctggaagcgaaagcacttctgaattcttcaagtatgaatatacaagagattgccgatcggctgaattttgccaaccagtcgttctttggaaagtatttcaagcattacactggtatgtctcctaaagaataccggaaaagccgctaaaatcatagaacaccggagcgcacacggcttagtgtttccggtgtcatcaaaagataagaggcaatgtgtgccagaggtgcacgtttgataatttccggatgtgtttcgagcaggaggttatagcgttcgcgggcggattcaaagcgccaggagtctgctttaatctgtgacacaatcaaggagtattccagtatcttttggtagaacatattgatttcccagttctcttttgccaatttttgtatcatgtcgcgagggaacaggtagataatggaaggttcgagggtttccacgattagccgggtgggtacttgtttcagaaaactctcaatgcacatcacgatacatccttcgtatgagaaatgttcggtcacgtctttcccattcttgtaatagtactgcctaagcatccctttgccgacaaatacgatttcatgagctacttctccttcattcagcgctattgctcctttgggaaattcttcacgaatcagtatactttctatctgtcgtcttccttctatactcatttccggaaagcgggaatttacaacagcatttacagtctctcttaataatgtatccatgtcttttctgtcttgatgtgtgcaaaaatactaaaaacggttgacataaatcaagtgtggtataaaaaagatgtatctttgtccgcaaaatcaagaggtaagatgataatgaataagataataggcttggcagtgttgctgttctgtttgagtggttgcgtaagggataatgatgctatttattatccggttggcaacgtagatgtggaaagaggcggtccggctttggaggctggaaagggtgatttaataacccgtagttacaataccgaagattatgtgctggacacgcttgcgcaatatccgggtgatccgacgcttggtaaactgacattcatggtcagtctgaaaaaccggttggcagatcaggaggtgagtggctttaatggtgtcggtctatccagactaacgatgagtcttggatataaagacggcaactatccggcagaaagccaggttcctgtttatacttcgtccgacgtgactgccagttatgccattaaacttcgtttaaagggagaattgactttaacaggagacgaatggatgattgactatatttatgctcaattagcgggtttattccagccttatcctcctacgtctttcccggaagtgtttatgtgtaaagggggtgagcaatcgtatgcaacgttcgattcttttcgtagaacctggacatttgatattacttatgatcgttccaacctttctttcagccaactgtatttcaatctgtttgtgaatctggcaggacagaaaagggaggatagagtccggttgaggattgataaggaatcttatttcgagatctataaagaaaaagaggaaatgtagttaaactgcatttcctctttttctttggtagtgggtacgagaatcgaactcgtattacatgcgtgagaggcgtttttgtacaccatctaaaacgcttataactaatatcttataatatttataaaatctatttgcaccgaatttgcattaaaaaacggtactcatgccctttcttataaatatcacctcttatatttcatctttatcaaagaacgttttcaatacaaagttaatcaatcaatcagaaatagcaaatattatttgtttgaatttaagctatctgtttctagtttatccggctaatagaaaaagtactattatgacagatgaagaactaagagcattttgcttaaagcaagctattcaaatcattactcacaaagaacagcctcgaaccataggctttcaaaatacagatagtatatacttatttgaacttactgaaatccttttagagtatatcaaaacaggaaaacaaaattatgtacccgtttacttgaactacttcaaataatcttttatttcacgctcttctgggatataccccagttctttattttttttcaaaagaatattggcaagtttaaaataatcagtaggtgtttccgaccactccgaaagaacatctattagattttccatatctgttgttgtagccatacgagaatccgcttcacgagtgccgtacgtgatgcctgataattctttatgtgcaagtaaaatgcaaattaactctctaatagttttacttatatcattatcttttggtaaaaaatcaccaagaaatttttgaatattttgataataaagggtatatgatcttttaggatcctgtagtggtatatctaatatttcgcttattgcattggggttctttacttgtccgaacaaatcttcttgtgtttgattatttgcttcaataattttatctgcagcactgattagatcttctaattttttctttggtaattccataatgttaatttatttagattgcacttttaaataattcagtttacattttctcaatagcattttctaatgatcttttttccactgcatcgaatagtatatttcgtgtagcaatatcagaagatattaaattatcaccattgttatatttagcaaattcttgagcttttaatcttccatttggcaaagactctaaatagactccgtatattattgatggagatatatttaattcttttgctaaaagatgtactttaaatgggaatgatataattttccggagtttactttgtacagaaggattaaccaaaacatctaaagcaaactgatccgctctattctcatttaataataattcaggtgtttcagagttagaaagatgataatccatgctttctagcatctcaaaatcatttattacatgatataattcatgtaataagttaatccaaagtttatgatactgcttattcatatctgtaattatgatacatggcttcccatttaatatcatcgttacaccgaaagatttagttccagatacataagattgtgttaacacggtgatacctaattgaaatagtaccaaaacaaatcttttgtaaccgttaacttcgtcttgcgtaaactctgatgctcgctttagaagttggaataataagtctttatcatagtcatttggattatctattttagaaaatgaactaatagcacatttgagccaaaatgtagtcattttagcctccttttcttgtaagattttcttttttgacttactaaataaagttggcattaatgatgtatcgtcgtactcatatatagaagaaaaaccgaaaaagtcacaaatacattgttcgtattcatcaattttcgctctgcttttgattattcctattttttttaatgttggaacatcaaagttttgcattatatatgatagcttctcaaatttgtccaatgaagatgcttcatctatatttatatctttgcaatatgcagaaactaattggctttcagttaagtctaatagcttcattaaacgaattgcttgcataaattttaattcagctttcccttctaggaatttagatagcgtttctttatggatccctatttcatcggcaatagatgattcaataatttcattctcttgaataaatttagcaagcatctccctaagcgagacatcaatgggggcttgggaagtgtttattttacttatatacataattcatcgacatttttatgcaaatatagctattttgaatagaataactaatatttcactgacatttttgtcgatgaaataaaatgagatacttttttctattttatttttaatataaaatggtatgtttaagataatggtttgaagatgtttatattgggactctacgaattaaaatgcttaatctctgacgctgtaaagtcaccctcatgcgaagcgcctccacctgtataacaactatactttccgtcctgtgtaatctctttgatccgcatttgcttattcgtctttatctctacgaccaattcgcctatactaaattcggtcggttgattattggagagcgatacgcttttctttggatcggtcgaggatagatacttttctttgatttctctaatgtcgttcgtcattccccagattttgaagaataggacgatttgaagtacggcgaataatgccgcgatgaagccgaaaaatgttcccatgatgatttgttttagtggttgataactattttagagattggcattaccaattatctttatcgctattattggcaattgtcattatctctttttcgaaagtttctgccgcccctacagtgtgggcataacagaaccatatatttgagaaactagcctttcgatgtttcatcggacattctttccaaaaaggaaaaaatgattttagtttatatttatttttgcttatcgtttgtcctgatactccattttttacagtgttttctatttcgtctgtttgtatcgaaatgcggcatttataatcttttacttctattttgattgcgtgctcgcatttagattctgttaatacaccccatgttgacatgctactttcgaaaaagattcccttcccaaaaattgttcctaactccttgtctttattttgtatgacttccttagagtctttatatatattagatagagcttctagcgctgcaatgtatatcttatctttttctatattggggagttctacaactttgattatttttattccttcttccgtttctgtgtaattcgattttatagagtcgaataattcgatgatctcattagattgtttttcgtacttactttgcgaatttgcaggcaaaataagcagtgaaaatatcgctaataatagtagcttcttcatgttgttttgtttttagtgatttataatatgtttttgattgataaaatattctctacaataaaaagatgaataatttcgcgtttcggtaaatcgatatcgtcgtaattcggattctcgctacgaagcagaattaaattatccgcatctttaggatgcctacgaactctctttataagcctgtattcattcgttatgattaaatacacttgtccgtagttgaaataatcccaactttcgatttttctaattaccaccctatcgcccgaagcgattagcggtaacatactatcacccgtagcgaatataatctttgaatccgggttgatttccggtgcgtctatacttcctatcactttttcgtctgtaaattctatatctctaccacttagcccgcaggttgcgtctatgtcgtatattaatgctccttttcgttttgttttgcttattgcagattcggaaatttcgattgttttttgttctcgctctgcatttttaatcatttctcctttatctcgcagaagccattcggttgacatgtcaccgtatactctactaattttcattgcaatatcggcggatatacttttggtcttcccccaatatcccttagataatccagcttctgcttctaatctatatacactaactcctttataatcaatgtatttctgaattttttcttttatagtcatactttcgtctactaataaaggttaattaatagaatatattctactaaatatttgtatagtagagtatagtcacctatctttgtcgcatcaaagttaatcaatcaatcaagaactaacaaataaaagtatagaattatgaaagcaggaatgatcggagacgtagaatttaaaaaagcaggaagcgaaacggtatgttgtgttagcttgattaatacaacagccggacaaagattcttagcgtgtacactttctagtagcaagactttcaaaacgttcaaaggcgcggagaagtttatgaactcattcggttatcagaagatttaatattaatccgtagcccttcggggctacataataaatacgattatgaaagcaactagcactttaaccagaaagacagccttagagatattaatcgaaagccgtgataagagcatcattaatgcgttaattgcgaaaaaagaaatagcattagaagaggctgttaataatgcagaatggtatgcaagtctcgggcttgacggaatggcagataatgaagtagcaaggcaagaaaaattaataagagatatagagcgattgaaagcagctatttaatattaatccgtagcccttcggggctacataacacgatacacgacaatgagacgaaaaagaaacgaattaactgcccttttaagggggatgcagcccggggaaacaatgaccttccctcgttctaaaagaaattcagttagaccgacctgtacaaatctaaaatatgacgaaggtctactgtttacgacggaaaccgataaagataatctaattgttacacgattgaataatgaacaatgggacgaactagagtaaccggaaaagttgagccaatagtgaagaagtggcttagtaaagacgaagcaaaatcctatataggatgctcggatgattttttgagaacgttacgggaaaaagctctcatttctttttctcaatttggaaaaatgatctggtacgatttatcgagtatagatagattcatacaaagtaataaggtagtataaaacaaacaccatgttaacactaaaacaaagtcccgccgctattatcttaatgctttcagcgtgcagccttgcagaaggcgagccggagccgggcaaattaattatcgcactattgatcgtatttataacggttatctacgtgctagtctgtaactatctaaacgtgaaacgacatggcggcgaatcctcaatgtatcggtaattgccgaatttgtacggttcttggcgcgtgccctgctgatactctagtttgcgaagattgcggcgaagagatcgaaccgggcgaagagatagaattagaggtcgaaacgtacgaacgtggcagacatggcacaaagataataacggtttgcgctcgctgttatgagtcgctttatcagggtggaaacgataacttttaaacaacacgataatgacacattggaaaactcaatttaattacgactatctaggcgcttacagcctaccggatggaaaagatataattctcaccatccgcgaaacgaaaaaagaacaagtagtcggcgcgtctggaaagaaagaagaatgtttcgtcgcttatttcttcgagaatgtgaaaccgatgatcctcaaccggacgaactgcaaaacattgacgaaaattttcaaaaatccgaattttgagtcatggataaacaagcaaatccaaatcggagcggtattagttgacgctttcggcgaaaaggttgattcgcttcgtattcgtccttttcttccgaaagtagaaaactcattgcctactgttgagacaggatcggcaatctggaaaaatatcctcgacggtctggcgggtggctttacggtcgcacaagtccagacgaaatataaactaactaaagaacaaatcaaagaactagtagcacatgaaatcaagtgaacaaaaagaaatcgaatggaaggaaaagagacaaggcaaaataactgcctctacgcttcccgatttaatgaaagcgggaaagggttgcccgttcggtaaaacttccctagatgcaatgtatgcggttcgctacgagcgtagaaccgggacgatgcgagaaaacggaagtaacaaggcgtttgattggggacatgaaaacgaaccgctagcggtcgaatgggtacggagccagttaatgaacgagatcaagtcgtgtacaaccgattttaaggacattgttttcaatgaaccgtttgaaggattcggagattcaccggatttctatgtgtacggatttgacgggaaagttatcgctctgggtgagatcaagtgcccgatgtcgcaaggaaagatcgaatcgctgcagttcggaaataccatcgacgaaaaagacgaatattattggcaattcctcggacattttctaggtcgcccagacgtagacaagttgtattatgtcatttatgacggctatgtaaacgacggtcgaatactcgaaatgaatcgagccgattacgtggagaatataaagaaactctatgatcgaatccggttggctagcgagatgatagacgaatctatccgttccggtctggatttgcttgattgtgtcgataaggcaaaagcggtattagaattaaagatgcagatcgaggcgttaaagccggaagcgaaaaatagtgttccggtaaagaatcagatttataagatacggaaggagttaaagaagttaatcaccaataaaataaaaaaagcagcatgaataaattaattaaaacagagaatattctttcttacttgaaacaatactgtacaaatattcctattgattcttatcgggatattgagtgcgcattaggcaaggagttagttattaatgatgaagaattacgatccgacctgaaaagcgacgggacgagttatttgtgtctcgaaatagacaactcgacatctcttagatttaaagtaaccgaatcatttatgtataaaacatttccgtatgattctgtgtctgtaaaatgcatcttagataattattccgttcacgctgtaccgtcacaacgctaacacaacacgattaatcacacttttataaacactttaataaacacgaaattatgaacacttggtttttaacgaaaattcgctacgagaaagtaatggaaaacgggatgcaaaagaaggtaactgaaccgtacttagtcgatgcactaagttttaccgaagcagaagcgcgaataatcgaagaagtaacgccgtttatctccggtgagtttacagtgtccgacatttcccgcgcacattatagcgagatatttacaagcgaagaggattccgccgataaatggtttgccgggcgactcgcttttactacacttgacgagaaaagcggcaaggagaagcgaacgtatacgaatgtacttatacaagccgcagacattcacgacgcaatgaagaaactcgacgaaggaatgaaaggaacgatggcggattattcttcgattcttctcaaagaaacggcgattgtagatgtttatccgtatgaagcgaaaaataaagaacaacagaaacatgattaaacgacattggatgctattaatagccgtgatagctatcccaataggaaaccgcctattcaaccatgttagcgcgtggttgggcgttatggttattttatcggctgtaattttcttaatttacaaactaattaaatttttaaaaatgaaagattttaagtttttactattggcatttgttgccgttgttttgttcgcttcatgtgaacgtgtcgctcccaattatgcaggtgttttcatggagaattacgggaaagacggaaagaacgatttttccattaaaacgggacgcgtttctacgtgggaatggggcacagaactttttcaagttccattatttgaccaaagaggtgactttgccgaacctgttacactaaaagcagcagacaatacagagtttaaagctcgtccgacttattcatataaagtgattaaagaaagggcggtcgatgtggtattcgataataaacatattagcgacggaggcgattttatgagttctcttgaagataatatattggagccgcgtatatatgatttaataaaagaagaaagtcgtaaacataaaacggatagtttgatggcagacggaggctcattgatttttgaaagacggttagaacaaataatcgaaacggagtttgaaaaacgcggattgcaattactaacattttctgcacaattagaattttcggaaaaggtacgtgagaaaatagacagtcgtaatgaagtaaatacgaatatttcggtattagatcagcagattgaagaacaaaagaagttaaacgagttagaacaactaaaaacagaacaggctatcatccggtcaagaggattgactaaagaaattttgtacaaacagtttattgatcgttgggacgggaaaacggcgttatatgggattgttcccgacttcttgaaaataactaaataacaacgcgccgggtgaaagccccggcaaatcggataagtggcggaattggaaacgcctaattatgtaaggttgatcgccagacattccgttaatgcggtgcggctcttgaagtatcattcccggttcgaatccgggcttatccactatttacaaaccaaaataaaatatgatgcagataataatagggaaatgccctagcaagagtaattgctacaagataattcaacaaagaggtaaagacggaaaatatcacggatcacttgcaaaaaaagatgctttggtgatgtatgaaaagtctttctatcttcaatgtagccaatacagaaataaacaaataaaaggcttatttgaactctatttaagcgtgcactatgatacgcaacgaccagacttggataattgtcttaaaattgtgttagactgcttgcagtcatgtagagcgatacgaaatgatcgtaattgtgtgaaaatagtggcggagaaatatatagataagactaatccgagaattgaatttgaaataaaggaggtataaaatggcgaagaaaacaacacaggtacaaaaaagcgattgccggacgtgtcggaatggcggagaagagaataattttatttgctattgttccgtcctgaaagtgggacgggcgatcgggataaggatttgtagttattatatcgctcgatagactttataagtgtgatgaatatagacggatatacgctaactgaaaagatgcgaaaagcgcgacgacgtttcagatttaccgccaccgaacaagcccttttttacggattagtggctatttgtaacggcgaagattggagggacgttttcgattgctcgaacattgaactttgttttgcgcttaacgtgaatgagaaaacactaataaaagcccgtgagtctttaataaatgcaggattgatttattataaatctggtaagaacaaacgtattataagctcttattctttcgtgaaggaatttaaaaccactgtaactactactgtaaattttacagccaatcaaacagccaataagggagccaatcagacagccaatgatacagtagataagggagtcaatgatacaggggatagtacagactataataaactaaaacagaaaccaaacagaaatatactctctaaagtctctcatggagattttgattttatatctaatgagtttttagagacgtttactctttggcttgaatacaagaaagacaggcgggaaaattacaaatcggaaaagtcactcaaagcgtgttacaacaaattagtgaaattgagcaaaggtaatccggcggtcgcatctcaaatcgtagatgaatcgattgcgaataattgggcgggattttttgaactaaagaataataaaaacgaatatggaaacaagaagcaaacagactctaccgatagcggcgattctatcatacggactaccgtactatgacgagccgatagaagtagagaagcgcccggagtggtttaaagcgtgttgcaaatacgtttgccccggttttaagattgacgattcgaatagaaacataatgaaccaactgtttttgtatactgaaggacgatccgagaagctagattcaaataaagggctattgttacgaggtgacatcggtacaggaaaaagtactatcatgcagattctaaaccgatatagttgtttcacacgcggcaaagcaaagggcggctatccgatcggtggttttaggattgattcggcttcctgtattgcaaacggcttttcgatgcgcggaaaggatgcactagaattgtatacttacaacaacggtacgccgcgaatgatctgttttgatgaactaggacgcgagccaatcccggcaaagtatttcggtactgaactaaacgtgatgcagtatattttccaatgtcggtacgagttgagacatgaggcaataactcatgttacaacgaacttaacgattaaggaaatacagcgtatttacggcgcgtatatcgcggatcgaataaatgaaatgtttaacgtcttggacttgaacggagctagtagaagataattaatacaacgaaaccatgcgaagcagaaaaaagaaacttgtgtattttaaaaagattccggttcgcgtcgatctggaacaatggcaaaggctcgataagattcgcgctgactaccatttcaaaagcacatacgagattatgcagtacattttaggctgctttctccgggttgccgatccgatgccaggcgatgatgatgaagaagtactaccggacgaaatcaaagaaatgttctacgatctatcacaggcggaacgacatttcgagtatgtaaaaccaaaacgaaaactaccacaacacaaggtagacgaaatgaacggacagaaacgattagaaggattttaatatggttaaaaaactatcaaacacaaattatttgcacgacgttcctgtagaacacgccgaagcaaacgaacggaatcggaagtatatcgaccgatttgtttcagagaattataacggcttagttgccaagttttcacctctagacggcacaataaattcaagtgctttcggagcactcgataaattaaactctacgattatctcgctctatactgatccaaatttacactttacagattgggaacaggcgaaacaatatctatcgaacaagtttacagaaaaggcaattcgcgttccggtgaagaagcctgtcaagagtgaagtagtagagaacgaggacgaatttattaacgactaatattattgcttcaatgaaagacgtagaactatttaacgatcatttccagaactataaaacatacggtattccgaaagcacaactaatcattgcggatattccctacaacattgggaagaacgcatacggttctaatccatcttggtatatcgacggagacaattctaatggagaaagcgaattagctggaaaagaatttttcgataccgataaggattttcgaattactgaatttcttcatttttgtagcaagatgctcgttaaagagccaaaagaaaaaggaaaatccccctgtatgattgtcttttgtgaatttcagcaacaattcgaacttatacagaaagcgaaggaatacgggctgaacaaatatatcaatctggtatttaaaaagaacttttcggcacaagttttaaaggctaatatgaaggtcgttggtaattgtgaatatggtgtactcttgtatcgggataaactgccaaaattcaataatggcggtcggatggtatttaattgtttcgattatcctagagacatagatacaccgcggattcatccgacacaaaaatcagttccgttgcttgagcggttgatcgaacttttcaccgatgcgggtgatgttgtaatagacccatgcgccggaagtggtacaacattacttgcagccgctcaatgcgggcgaaaagcatacggatttgagataaagaagaagttctatgcagatgcgaataaaatcattttgtcgcggatgcagcctagaatgtttgtgtagaactaataaacgatagaattatggcaatattagattaactatacgacgattgagcatttcgtgtatagctaaaattttaagaattgtatatacttagactcgtttaattactataaactgacctttttccaatttcgatgttaattctttgtattttctaaaagcttcatcttcggtcagtaaaaagtaaacagagtcagtcataatcgttgtgaaagttctaggatcacattgataaagaataaaaccaaataaatactgttccataagtataaaataaaaataggttatacgacgattcaaatgtaattaatttatctaagaaataaaagaaataacaataaatagagcttttcgggctttgtatattctataaagaatgaatcaaacgcaaaatcaatcaaagtattattattcccctcgttttcgacacttcaatatctatcgtcgcgatccagacggagacacaaaggtagatgatgcggcaacgcaagaagaggcgaaacggaaagtctacgagttaaacggatggaattacaaacctaaaaataacacggtaaaatgagtaaagtaaaacagtacatcgaacaagccacaaacgagcgcatccgctcgcgtggcttaatccgaaaagtcgctattgaagcggctcggatacagagagacgaaacgaggcggcaagctatcgaagtgtataaacaaatgtgtccgtctaagaactgcaaaggttgtgcaagccggatacacaaacaggaaacgcagtcgactcgatgcgacgggaattgtgcacggattagattacttattaacggattagaccggatcgaaacgttatgtatataatcaggcgtattcaatgcaaatcgggcgatgtgtccgagacgcatttagttgagatagaaacggacgacatcgaggcgacacgaaaggagttgcacgattgttatcaatgtgataagattctttttaattatgacgaacaatgagtagaaacccgcattacattaagatgattaactccaacaaatggaagttacttcgagctaagaagctacaaagcaatccggtttgtgagatgtgcgaggcgaacaatcgcagtacgcttgcaacggaagtacatcacactgtcccggttgagtccgtatcacacgaactcggaatgagacaactaatgtttgattataacaatctgcaaagtctttgccattcgtgccactctgatacgcatcgacgtgcttttagtcattcgaaagaggcggtacaggcgaataataaacgaatgacggaacgttttgcggatcggtttttgcaaggcgagaaataatatttttctgatttccttacaaccgctcaacctcgacgaaggggggggcggtttttttattttttaacgcgatacgctaaacccacctcacctcatatttacacgcgcgagtaatttttgaaacgagggggtgcgcgttgggggtaaactttttgcgcgcatcttccgagctaccaaatacttgcgatcttttcctatatgcaaaaagcctataaaaatgtgtgatttggacgacataaaagaaaagattcgcgccgcgatggagtcgcagggaacatatacggaagatttagacctctgtataactctttgcgcaggttcatatatggcgtttcaaattgcactaaacgatatttcaaagaagcgtatgaagtcatacgtgaaagaagtgtcccgcgaaaataatgataaactcacggcgcatcctgctttcaaagttttattcgatgcactcgaagcaacgcgcaaacaattacgcgaacttggtttgacctttcaaacgctttctgtatctgacgacgacgaagtaaacgacctgattaacgaagtaagcaaaatagatcgcgatgaacaaggagaatagagataaactgatagcgttaaagcagtcggttgtctccgatctgcataacatcgacgttgattcgtataagctagacaaggcagacgaaagactaaatgtgtatatcaaaggttgtattaacaatccggacgcgcacaacctttacgagttgctagccgttcaccgcttctttgtttttcttgataaatacgaatttcggatcaaggaagtaaagaagttcgtcacgttctacgagcgtttgaaattctccggcacaaagggaaagactagatacaagctgactccgatacaggtgtttcagttctctaatattctcgcgttttacaagcctgacacaaacaagcgtttgattcgcgaagctcttctattcgttccgcgtaaattcagtaagacaacaagtgtagcgagtctttcgattaacgatttgttgttcggtgatgcgaacgcacaaacatacgttgctgcaaactcatacaatcaagcgaaagtctgttttgatgaaatacgtaatattttaaagtctctcgatccgaagtttagacacttcaaaattaatcgagaaatcatatataaccgcataaagggaaaaacctcttttgcccgttgccttgcctctaacccggataaattagacggacttaatgcaagcatggtaatagtagacgagtattcacaagccgatagcgccgcattgaagaatgtattaacttcctcaatgggcgcgcggctcaaccctttaaccgtagttataactaccgcatccgataaagaaacggctccattcgtcgaaatgctcaaaatgtataaagcgatcctacgaggtgagattgaaaatgattccatatttgcacatatctttgaaccagacgtagacgatgaggaaggcgatccggcaacgtggcgcaaagtgcaaccacacatgggtataactgtttatgaagatttctatatcgacgcataccagaaggctttatatagtgcaccggatgcgctagagtttcggacaaagttactaaatgtgtttgcggttgattctacaacaaaatggattgaggcaaagcagatagaagaacgattcaaagatattagaattgagagtatcggtacttatccgctaacgatggcggcggttgatttatccgttcgagacgacttttctacggttacttataatatctattcgaaagaaagcggttcttttcattcgcatacagattactatttcccgaaaggagctttgaaagatcatccaaatcgggaactttacgaaggttgggcgaaagcaggctatttaattctttgcgatggtgatattatcgactatcagcaaatagtaaacgatatacttgcgcgtgcaaagtatttacaaatcatgggagttggctatgatccttataaatcggctgaatttgtaaatcttcttacttattccgtaggcggtgcgagtgaatatattaagcctgtaaaacagacatacggaacgtttacaagccctatcgaatcctttgaacttgctttgtatcggagtaagctcacttttagccctaatccgattacgccgtactgttttagtaatgcggtattagacgaagatcggaacatgaacaagaagccagtcaagaaaacgcacaatgcgaagattgattcgactataacaaacctaatgacattctacttatttaataacatggaggtataatgaaactatcttttaattttgaattgggacgttcaaagacgcaaaaacgcgccttaaatgcagagatgagcacaacggataaagatgcggcgataaactcccgattaccatcgttacccggtcagccaatagatgtgcataacagtaatcaagcaatgaaactttcagccgcatatagatgtacttctattctttcggggactatcgcgtctttaccgcttataattaaacggaaaaaagatggatatttctcaccagacgaggaaaacgatttatatacgatattaacccgtatgcctaaccgacgaatgaatagttttgaaatggttaggaatatggttgttcaaatcgtaaatcaaggaaacgcctacatcgttatccgtcgaaagttcggtagtgtcagcgaacttgtattatgcgcaaataatacagtaacctatgacaaattgaatgatgtttatattatttctgatccatataaccggatatatgggcgttttgaatcctacgaaataatccatcttaaaaataatagtttggacgggggatatacaggagtaagtacaataatgtacgctagccgtatcttttccatagctgcgagcgccgacaatcagaatttgcgaacctttcaaaacggaagtaaaataaaggggcttgtttccggtgcaaaagagacaaataaagggttgcccggtgcgggtatgacggatcttcaactttctacggttggggatcgcatagaggaacaattaaacacaggaagagacattatttcagttcccggcgatgttggatttcatcaactttctataaatccggttgatgcgcagttattggaaacaaagaaattcagtattcttgatatatgtagattttacggagttcacccggataaagtatttgccggacaatctactaattacaaagcttctgaaatgagcaatgtttcttttttaactgatacgctgcaaccaatattgaaacaaatcgaggctgaatttaattacaagctgattcctaattcagtcgctcacttatatagtatttcatttgatttatcatgcttatatcaaaccgatttaacgacgcaagcaagctattataaagctttggaagaaatgggcgctcattccccgaatgatactcgtagggctttaggaaaaccgcccgttgaaggaggcgacaaggtgtttatctcctgcaacgttcaaccaatcgaggcggctagtcaaaaagtagagctacccaaaaacgaagaaataaacatatagtaaaatgatatttgcaaaatatggaaatacgaagttatacagagttaggcgctcctaaagttggagatggaagaataatcgaaggttatgcggttgtattcggacaagaaagccgcgtattgtacgacagggaaaagcaacgcgcttttgttgaggtaatcgaaaagggagctataacggaagagttgttgcgtagttgtgatgttaaagctctgttagatcataacaaacagagattgttggctcgatctaatcgcggtgcaggtactttgtcgcttgaacttgacgactacggactaaaatacaggtttgaggctcctagtactcccgatggagatttcgccgtagaaatgattaaacgcggtgacattttcggttcgtcttttgcgtatgctttaaatgaaaaggataaaacaaaagtttcctattcaatgaaagacggattgttgcttcgtactgtacacatgattgatcggatttctgatatatctcccgttgttgatcctgctttttatggtacagacgtaacggtgcggagtatggacgatacgatagcggaattgtccggcgagaataaagactatttaaatgaacttaataatttacgcaaatcaatttaaaacatgagaaaagaatttgaaactattgctcaatacaaagagcagatgcgcgctatgctggataaagcagaagcggaaaaaagagcactcgacgcaagcgagaaagagcagttcgagcagttgaaaacaaagaaagagcttttagaaatgaaggtagaacgccgtgcgcttgaagatattaacgcgggtttggtgtcagaccgtcgcgtgttgttctcacaggctgtttttgacgtcgttaatcatcgctctttggaagaatacaacggagtagtatcggaaggcggtattaaagttgtagaacgtgcggtgactgttacagatacaaccgatgcggctagcatggttcctgttacaatcggtgaaatcattgaaccgttagaaaaaggcttgattattgataaactaggtatcaagatgcaaagcgggcttgtaggtgaccttgttttcccaacattggcggctgttgaagcaacaattcagggtgaaaacgttgcggttaccgataccgaattgaatatcgacaaaatcaaggcttcacccaaacgcgtatctatttctattccggtgtctaagcgtgcgatcaaccaaacgaactactctttgcaggacgttgttttgaagcaaatttcgcttggtgtcgctcgcactttgaataaatggatgttttcgggaactgcattgtctggcgcaagtaacggggtatttgtcaaaacaaaaccgagtgttgaatatacaaacgagttgacgtttgcaaatgttgtttcgcttgaatctaccgtaatggatgcgggcgtagatgtaaccgacggtacagccgcctatgtttgcactccaaaggtgtatggcgctttgaaatccactcccaaagcggcgggatctgctgaaatgatctgccaaaacggtatggtgaacggttatccagttcttgttactaactacatggatgccgattctatcggattcggtgtattctctaacgctgctatcggtcagttcggcgatatggatttagtgatagacccgtacaccggagcgaaaagtaacatcgtaaacttcgtgttgaatacagattacgacattgttgtagctcgcccggaagcttttgccatcgcaaagaagaaagcggcttaatataatttgattattgatattgaaagggctttggcttcactgccttagccctttcttaattacttgaatatggcgcaatacgtaacacttgaagagcttaaacagcatttaaacgtcgatttcgatactgacgatacatatataaccgggcttatcgaacccgttcaacttcttatcgaatcgtatctaaataatccgttagatacctacgttaaggacgcaaaaatagatcggcgtatctggcacgcgattcgcatccttatagcgaattactacgcaaaccgtgaatcggtaacatttgccactccgcaagttattccggggcacatagaactactactgcaacctttaaaacgatatacgtaatgcaagcaggattattaaacgaaatgatcgctttttatcgtagcgagtcaaagcgcgataatctgggcggcacgtctgaaagttgggtgaaagtattcgataaacgcgcatacattcgctttaagtcgggtgcacgtaaagaagcgaacggcgagatatataatacgaccgttaatacggtaatgattcgcatctgtaaagagatcaacgctaaaatgaggatcgaatacgacgggcaaaaatacaagattctatctatcaatcacgaccggaagcaacaagcaacggttatagaagcggaggtaatcaatgagtaacgacaattacacagggcgcaacttgtatcgcgtcgaagtggatgcaacgcgagtaaacgaactacttaaacggttgaacgataaagaagcaaagaaggcaatttcctccgctcttagaaaatcgattctcatcattcgcaaacaggcgcaggaaaatttagtttctgctgttactgatgcagaatttggaagttctaagaatggcgtatcattcaaaccgttaaagaacgaaataaacgtagcagtttatcgcaatgcttccggtgcacgggtcgacttgatcgaccgccgtaaaaagggatcacgcgcctatatgttgaaatggtttgaatcaggaacaaaagaacgagctaccaaaaaaggagcgaataggggtattataaatgcttcccacttcttttctaatgcggtcaaatcgaagcagaaagaagcagagaattcactagagaaaaatataattgattctataatgaaagtagcaaataaaaagaaatgagtttatcaataggcgcacacgtatataagagattaagcgactctacggagttggcaaaattggtttctgataaaatatatgctatctcgaccaaaacggaaacatcttttccgtttgtgatctacaaacgcaactccttaacgccggaatatacgaaagataggtacggcacgggtgacacagtttcggttgagatcgttgtcgccagtgataactatttgaactctgttacaatcgcggaagaggtacgtaaatcactcgaaaacaaacgaggaagttatgataacttcgatgtgatcgactcgaaactaataagtgcggacgaggattttatcgaagatactttcattcaacgccttatgttttcttttaaaacagaataataactaaaatacgacaaaattatgagtaaaacaaaagcagcgttaggcaaagacctaatgttattcacagaagataaggctatagcgttggcaacttcatgcaagttagggttatcggctgaaactatcgacacgcaaagtaaagattcgggtatctggacggagaaggatattaaaaaactatcttggaacgcttcaagtgagaacgtattcagtgccgatgttgatgcgaatagttacgataaattattcgcattgatgatcgcgcgcaaacctattacgttaaaatttggtattgtgagtgatcccaatgcaaacgagatgcctgaagccggatggacgcttgcggcgggtgcttacactggaaaagctgttatcacttcattagaagcaaatgcgccggacggagataaagcgactttctctgtgagcttcgaaggaaccggaccacttacaaaagaggcagatagtaaataacttacgggcggtgttttgccgccttctaaacgacttattcaatgaaaacaatatcacttaacggaaaagatctttctttgaaatatacgcttcgtgcgttctttgtgttcgaatctatatccggctatccgtttcagttcgggaaattactagatgaatacattttgttttattcgttcctgatcgctagtaataaggattcgtttaatatggaatttgacgagtttatagaattgtgcgaaaatgacttgactctattcgaacaattcaaagagtttattttggatgaaatcaaactacgttcgcaatcggcaggaaatgacgtaaaaaaaaagaaggtgacgacgcggaaacgaaagccgtaagtatacgcgaactttattcgcgcgttgtcggtgagggcgggatcgctcccgattacttcctcgataaaatggactttatcgaggttgaatcgtttatagacggattgaatcgacgcaatcgggaagcgtgggaacaaactagattgttaggtttcattatagcgcaatctaatagcacaaagacgctaaagcaaaccgatatactccggttcccgtgggatgaagaagaaaagaaagatacgagcgtaacggacgaagagatgcaacgattacgagctaaagcaaaagaagtagaatcacaattaaacacgcataaagatgtctgatatagtaacaagattattgcttaaaacgaatgactttgacgcgaatctggaaaagtcaagaggcagtgtaaacagctttcaaggcggcattagtaatatggcgaaatccgtcggctctagctttgtaaaagttgcgggcggtattggtttggttgtaagtgccggggagggatttactaaatttctcaattcttcgcaaacgcttggcgatcaaacagccgccgcgatgatgtctgcaaagacaggggtagacgagttcttttattcgcttggttctggtgactttacttctttcttgtcgggaatggacgatattatagcaaaattcaaggaagctcattcggcgttggatcaacttggaaacacagaaatttcattcgattattttcaaggtaagttcgatgaatcaatagcccaagcgagattaaacgcaaagaacaagcagctaggaaatgacgaacgagatcaatcatttaaggattgggatgacgaattgaagaagaaagaagaggcgggaaaaacagttgcggcagatgctttaaatgcgttaacgaaaagtattgccgttggtacaaaactttcggcaaaagatatttttctgaatgattttgaaaaagttataagaattgatcttatgccttccgcaagcagggacgaagctaaagactattggaaagggcaatataatgagtatttaaaactatcaaaaaagattgaaagcgataggaaagtagatgtcgtaaaaacaaatgattatggtaaaacaaaatcaatcaatgatgcggcaaagatagcgcaagaaggggcagcggagaaatataaggatgcgataatatataataagttgctgaataaattaagtgatgatgatttgaaaaagttaacagaattaggaaagaaatactatgcaacttcgcagcagatagcccaacagcgccaagaatttaatgaatctacaacagagttccgaaactcgaaaataacggcggaaaaagcatcggcagcgaaagcggcggcagagcctaaaaaagattctattgcgtggtatgatgcggaaatatccaaattaaacaagaaactcgtagcagaaacggacacacaagccaaatcgaccattcaagcaacgattaacgaactcgaagccaagaaaataaaattacaggttgagactagcggaaatagtattgaagcgataaacattcagttgtctgcattaaacaaacaacttatcgccgaaactgatatgcaagtgcgtgcaacgattcaagcaactataaacgaactagaacaaagaaagatcaatctaaagtttgtagtcgatcaagaagcgtttaaaatcaaaaacggcgggatgaaagacggcgctttgtccgtacctattgcaccgacttacgataaggttccgacgcatgggaagggaggcaaaaattttaagttgccgaaatatgatccgctatttaaaaaagaagatgtagacttgaacgaagattatgccgattcgctttcggctattagtagtgtaatgagtgccttaaatggtgtaacaaatgaaagtgccgcctcatatttgcaatggggtgcaaatgttatatcaagtatcgcacaggctattccggctattttgagtttaacaaccgccaaaacagcggaagccgcggctaactctgcaaattcggcagctcaaatacctttcgttggttggcttgcagcggcgggggcggctttgtctgtagttgctgcaatggctagtatccctaaattcgcgacgggtggtatcgttccgggtgcgtcatttacgggtgataaggttccggctttacttaattcgggtgaaatgattctgaacggatcacaacaaagtaacttatttaagatgctaaattcaggtttgtatggttctttatcacaaaaaatcgcgccatcaatggaagatcaaagcgttcgcttatacagtgatgtcgaaataagaggggatcgcatatttttagcattacaaaaccacattaaaaaaacaggtaaaaaactatggtaaattatggcactatctatacgcttcctttcaaatccagaaaggaagtatcttatttgattgagatacaaaaagagaattatgaaggaaaaagtactgaattggtcggcagtggcaattctcctttttccgtgataattgaggacgaggattttttatatgcaccgactcgcttttcttctgcttcaatccgtattgttggaggtgactatttgcaaaatttgtattcgaccggatatcaacaatacagagtattatgcaagcgaggaaatgatattatttggacgggctttataaatccagaactatatacgcaggattacacgtctacaaaattcgaactagaaatagaatgtagctccgccatgagcacgctcgaatatgttaactacaaacaaaagaacgccgaacagcgaacttttattagtttttgggaactgtttagaatgttcattgagcagtctcgcgggtgttattcgtctatatttattcctcatgtgtatgctaaaaacgaagatgattataataacgacctgaacgtatttgaagaaatgacgattagtgaacaaaacttcttcgacgaggataacaaggctatgactctaaaagaaatattagaagaggtttgtaagttcttaaattggacttgtgtcgattggaggggtgaactgtatttcattgacatagatcacaaaagtatttattataaatatgattgtgatctgaatacatattctaaagctacgcctattgcgttgaatgtatctgatattggttttgcaggatcggagcactttttagatattttgccgggatataataaagtgactataaaatgtagtaattatcctattgaggaaatcaagataaccgaagattttgataagctgaaattattatcaaatatcggagaagtgtctactaatctgggtaacggtaatacaagacatacacaaagggaggttttatatcctaatattttaacgatgcaccaattcacctacaaaaatggtgttttgtctcctgttacagacttgtctatttataatgataagcgtaatgcgacggaattattaggggctattccattaagatacgcctcttatgaatccgggctaaaaacaccaactacgcaatcgtacaattatgagtgtgcaatacaagtccgacaacgttgtggaacaaaatacgatcctattaacgacgtaacccccaattcggtatttaatgactcgattgtagttatcggtgcaaagaaagacgccttatttttagggaagggaggtgctctttctctcaatatgagtattaaggttttgcaaaaggataaatatgattctccctttggtggcggtttggttccttccgaggatggtattacatatttaaaagatataattaaagtaggaataagaattggcgataaatatgtttctaaagataattacgggcggtttacgtggagtgataccccgtctactatgtctataaatttagatcaatctagtgtagaaaatgctgatggaaaaatgggaacggggtttgtctcattgtataaaacatacggagtactcggtaagtattctgatgcagacggtgttgtaatggatattccgactaatttatttggcacacttgaaatgtctatatatgctccgacattgacggaaagagagggacaagtcccatacgggtatttgataaaagaccttaagctaaggtattgccagccgttagatatggacgacgataaagactccgatcggatttacgagaatgttgttaatgaaaactttattaatgaattagacgaaatagagtttaagatttcgagttataacaacgatggagcgtgctatagtaaagtcttgttgttagatgaatatttgaaagataacctttattcatctattgaaaagactttgattcgcccggaagagcttttaataagaagaattattaatcaatacggagctaccaaaataaaactaacacaggtattattaaatagtgactctataactcctatatccgttctttcggataactacatgaaaggaaaacgtttcatgatagcaggcggagaaatagatttcgccaatgaacaatttacctgtaaaatgatagaagcataatgacgattcaaataaaaaataaagctattccgtcatcgccccggtcaaaaaattatccgactggggcgattgttagcgtgtcgtctggcggaggtagtggagtgacttccaacgctagcggatcaaatgttactattctaggaaaagacgatttgagatcggcgacagatttaaatgttttctcatctcttcgcacgcttgcggagatattatctataattgtaacgaaagatgacgccgaaacgaagctaacagatagtaatgttttatcgtcactccgagtaaacaaagaacttgatacaattaacgaaagatttaaggacgctatcgacgctttaaaagactcgtatttatccaaaacagcgccagacgaaacgcaatttcttatcaagttgctaggcggtttaattgttgacaatgggctagacgtaacgaagggtatttctacagatacgttgaccgcaacgacagtaacgacgcaaatacttaacgtccttgataaactgattgcgaaatcagcgactttttccgacaatgtgactgtatctaagaaaacgacaacactaaatttactcgttcaagagctagcggagacacacgatctaagtgtatctcatgttgcaactttaatgggtacaatagtaaaggactatatatcttccgagtcttttgtcagtggttttggcggcgaaggaatgaagatatacaaagcgatcacgggtgactggaatatggaaattgataatcttacagttcgaaagatattttctatatttgagttggtcgttcaaaagataacttatcagggtggtatgattattcgttccgccgcgggtggtaaattaaccaaagtgaccgacggcggctcacattggagatgcgagcatgatagtacggacgattttgttcaagacgatcaaataatatgtcaggcgttcacgggtacggcaacaaaacgttattggcgtttagttacttctgccggaacgggctattttaatctatccaaagtagactgtgaagaaggaagcggaatacccgaaaccggagataatgtggcagtattaggcaacagaacaaacactgctaggcaaaaagcacaaatagattgcgctgttggtgattccgcaccttatcgggatgactacgacggaattaattcctattcgcttgtaaatcggttgattacacgtaccggaaatcttaacggtattactgatgccgtattcggtgtattaactggctccggtttgtacggtactaatgtttatttaaaaggtacatttgtactccattctggaaagaaaatagaggaagcaatcgacgatgttaaaaacgatctaaatgagagaataaccgatgtagagacgaactttgaaattcgtgaaggacaaatttcttctaagattaaagaagttaatattgccgtatcgaacgcaaaacagagcgaaacaaatgcttccggtagcgcttcttctgcttcctcttctgctaccaccgccggggtttctgcaaataatgcggctaaaagtgctacggatgcacaaggagccgcgactaatgccgggaagatattggaggaagtaacattaaaagaaagttctataactcaaacagccggagaaatttctacaaaagtaaccgaagttaataaaaaggtaactgaagcgaatactgccgctacaaatgcgaaaaactccgctacgtctgcatccggttctgccggaactgcatccggtaaagcgggcgaggctgcaaattcggcagctaatgcaaaacaatctgcagataatgcggcgaaagtcctcgaagatgtgactttgaaagaaagctctatcacccagaccgccggaaacataacattgcaggttacggaagtcacgaagaacgtagtagaagcgaataccgccgcaacaaccgctttaactaaggcatcagaagcatctacaagtgccggaacagcttcaaccaaagcaggggaagcatctgcatctgcaactaatgcgaaaaacagcgcctctactgctagcattaaagcgggagaagcttctacttccgcgacaaatgcgaaaaattcagcagatagtgcagcggcaaagctcactaccatttcccaaaaagaatctagtatcaatcagacggcaagtagtatcacattacaagttaaagaggtgacaactaaagctaatgaagctgctaattctgcaacaaccgccgcaactaaagcgggtgaggctgctagttcagcaactaatgcggcaaaaagtgcaacagacgcaaaggcgcttctcgataatgtggatggcaagtatgtagccaagacggtatacgattcagaaattaaggtgttaagcgatagtattaatctgaaagttgaaaagacagatttcaacgcattaggatcacgtgtttctgctgcggaagcgtctataagtacccaagccggacaaattgcgctaaaagcctctcaatcatccgttaatgatttaaccggaagaatgagtaccgctgaaagtagcattacccagaatgcacagcaaatcagcttgaaagtaacatccaccgaagcgggcaatattgctgatggcaaagttaatgctctaaaaagcgatcttcaggcaaccggaatagatatagcaaatcgaaaagtaaccgtaactgccgataccttccgcatacaagataattacggaaacgcgatagcggtatttaaaaccaatactgccggaaaacctattcttagggctgaaaatatcgatgttgataatttaacagcgaagaaattagatggtgcaacaggtacatttaaaaagctacagggaatagatgacaataataaaataaaatgcgcaatcggctttagttcggatgagggaaagatgtattttgagggcgatatgcaacatcaaggaatattcaatgatcccatagaagggaatcggagttacagattctatacggcagatttgtggtgtagaggacaattcggacatcaacaaatgacttctctttcatttagttcaaattcaacttgtgatttttttgcacatatttataattatggtacagatactttttatcataaatatggtaaagccggacaaccgattgactgcatttttttagaaggaagcggaaataatgtggcatatatttgtgattcgcctcggcggaaaatggttacagttgtaaataactccaattatgtaaaaagagttatggttacgtatcaaagcagcaatactgtaactattcaaccgtggaactttttaatttttataactgcagatacatacactcttaataatccagcccgtgttgttaatttacacgttatgcaataaattatgaaaatagactttagaaaaattgaagtaacagaccttgaagggaataaaagtaccttcgatgtcagcaaagagttaggtaacacaatctacaataatactaccgacttgggcgaattggaatttgcgcaagaagtttataaacatggcgaagtggaagtagattcagaaaaggcggaaattatacgcaagtacatggaaataggacgttttttcgcccgcatcaaaaaaggtgtatttgatctattagacagtattaacaatgaaaaataaaaagattatggcaacaaaaattttgagtgaaaaaacaagaactacgcaggtagaagcgatcgcaaaagaaggtgaatatgaataccagacaacatattcgtacaatgaaaatggcataactcgtttgcagtgttgtattatccaaaaagcgaaaacagatttaggcgagcagactgtacacgctgggtatatggctttagaaggtgatagcaagtctatgaactttcctacaggtattgacatggtaccgcatatctctatgttcgaaaatatattgaaggaagtaaatgagggactaactactaaatagtagctatctaaaacgaacaaaaatacagctataagtaaaaatatggatgaatggttaaaaatcataggagcgttaggaggattagaggcgatccgatttactgttacttttctagcgaatcgtaaaacgaacgctagaaaagaaaaggctacggcggattctatggaacttcaaaatttactttctatcattgacaatctaaataagcagattgaacggtacgacgagcgactaaaacaacgagacgagaaagtcgatacgatttatcgagaatggagaaccgcacaggcagaggcgcaaaattggatgcgtaaatactacgagcttgaattagctttgaaggatgcggaacacaaccgatgtgacagaccagacagcgagtgcagccggagaactccaccacgtagaccaattacaattaataatcccttaattccgcaacactattataaattaaactttttaagtacctgagcaacaaaaagttgctcaggattttgccatgtcagaattttcacttatcttagtgttgcaaaaaaaacaagagaatccgacgatagacatggcgaagatacaaattaaatctgagagactcactccttttgggggattattttcaatcatggagcaatttgactccacattatcatctgtaatcgactcaaccctcggtctaaggtgtagatcgttcggttatcagtacagcgaaatcatccgttctctcatgagtatctacttctgtagcggttcatgtattgaggatgtcactactcatttgatgaaccacctctcgcttcatccgacacttcgcacttgtagctctgatactatcctcagggcgataaaggagttgacgcaagaaaacatttcatacacatcagatatgggcaagacctacgatttcaatacggctgacactctcaatactttattgctcaattgtatatttgcatctggccaactgaaagagggtgagatgtatgatgttgatttcgaccatcagttcatagagacagagaagtatgatgcaaagcctacatacaagaagttccttggttatcgccctggcgtggcggttattggcgatttgatagtcggtatagagaatagcgatggtaacacaaatgttcgtttccatcagaaggacacgctgaagaggttctttgcgagatttgaacagaatgggctcactatcaatcgcttcagagctgattgtggatcatgttccgaggaaatcgtggaggaaatagaaaaacactgcaagtccttctatatccgtgctaaccgctgcagttcgatctacaatgacacctttgctctcaaaggctggaaaactgaggaaatcaatggcattgagtttgaattgaactctatccttgttgagaagtggaaaggtaaggcatatcgacttgtgattcaaagacagaaacggatggatggtgtgcaggatttttgggaaggagaatacacataccgttgtatcctgactaacgactatgattcttccgtaagagaaattgtcgagttctataaccttcgtggaggaaaggaacgtatcttcgatgatatgaacaatggtttcgggtgggacagattgcccaaatccttcatggcagagaacacagtgttccttcttcttacagcacttatccgtaacttttacaaggccattattcaaagacttgacgtaaagaagttcgggctcaatgcaacaagtcgcataaaagcgtttgtcttcaggtttatctctgtaccagccaagtggatcaggacatcaaggcggtatgtgctgaacatctatacctgtaataatgcttacgcagatgttttccagactgattttggataatgcctacaacttatgggaatgatattgtgtattgcctcaagtcacattgtggggtaaggggatattgtaggcagaagtgggtgcttcaagttcaaattatctgcaaattcagtaatgagaggacgtgtaaacgcaataaggacgttcaagggcttagttgcggatttgaggtaatcaaaataaagaagaaagcaatgaataaaatagactcgattatcattcattgttcggctacgcgcgccgggcaggatttaaccgcaaaagatattgatcgtatgcaccgggcgcgcggatttaaccagatcggatataactatgttatccggattgatgggacggtagaaaaagggcgatctttagcagttgacggggcgcattgtaatacgaagggttttagcgaatcttcatataataaacatagtattggtatttgctacatcggcggcttggatgcaaacggaaagcccacagacacaagaacgatcgctcaaaaagcagctttgcgcgagttggttgctaaactctgcaaagaatatgagataatcgaggttctcggacatcgtgacacttcgtcggatttagacggaagcggagaggtagagccgaaagaatatattaaggcgtgcccctgttttgatgtacgctccgagttccctaatttcttgcgtaatacagtagttcgaccatgaggcggctagtttatattatcatattgctgatgttagcaatatgtttcgtgtcatgccggactcaatatatcccggttgaatccgttcgcactgaatacaaaacacgtgatagtacccgttatgatagcatctatcaacgagatagtatttatacgctcataaagggcgatacagtttatctgtatagatataagtatctgtatcgctacttaacaacgaatcgtaccgatacgattcttaaaaacgattctattcgtgtgccttatccggttgaaaagaagttaaaccgatggcaatctattaaaatggagctaggcggatgggtgataattgttatttttgtgtatatgttgatgtatgcattgcaggtgatattaggtagattaaataaaaattaagcagaatatttgaaagtgtaatattattactgctcttgtatgtgcattttattttttatatatttgaggggaaattttatatattgaaatatgggtgaagatgtagaaaaatcgttgtacttaagttacacagagatattgaaagggttacattttataaaagatgctattgactttgtagaacaagggaaagattattatgtaattcctttatcaggtcaattacgagctatatttgttttaccgcatgataaaaatgggaaccttaaaaattataccgttggtaaaaaaggaaaaacacgaaatataccaactaatatatttaatttagctcaaaagctaaattgtgatttagaagtatacacaagcgaataccattataaaaatagagataatcagtatttctctcacctatttgatactacaatagatccaacagggaaaaatttcaagagaatttctttgagagattggatggagtttgatattatagtttgtagaggatataggtttaaaatatgggaaattattaaaataatggcagatagaaacggaggagcacattatgacggagcattaacaaggaaagaaatggaactatataaagcaaaaaatgctgctaactattatccccttttgtctttagtcttgactaagatcggtaaagttttgtttcaaataggatttaaggttataagatctgtattcaattttcagtttataatgggtattgctttaaatttaccaactttgacaacaagaaaaaatattgcaactttttattcaatttcaggtttttcccctctttcattaagtattgatgaaaagaatatgataaagttaaatctcgagaatcttgaaggacacaggtatgacctagatattggggaaaataggagtgatgaaataattgttattaacttgggatatgaaatcagtgcagatatgagcgcaattcttagcgtatattattgcaatgaattcattcaatatagattagatacccctatttttataggcagaggatttttgccacattttaaagtgtatttttcagatgataatattaggataggtttttcaacaatgaaattgtttagtagaatattaagtccaggaacttgtttatatcattatagtgagatacgaaaaaaggaggatgaagacattgctgttgttgagggtaagcaagaaatgttacttttgaacaatcatactgtagatttttcgaatggggttagttataaaccatttagagattatattaatgacaaaatgtaataaagattaaatgagaaaaccccgcaacggctcacattgcggggttagtgtcaaataagaatcttaaccgagtttaagcgatgtttgatgaatcatttcgcttacatccttcaaggcatttaaaaatgtttgaagttcattatcggtaaagcgagcctttttcccgtttacgatgttaccgttaattctttgatatagccaatttcttgactttccgaaatacttctttgcgatatagctaaacgaaatagcctccggcaattctccgagcttatctcttaatatagcttcttccgctctttcaatgaaatcgttacaagcgtctacagttgcttttagtccagattcagacgcttttttataggcttctctctggtcctctggcagtgcgttatatttggcttgcatttcttttttgaaagcatccctttcttcttgtgtagacaaggttttaaatctttcaaaatccgctttcatttcgggtgttggcaagcaggcgtttatatctatcatattttaaagttttaatccctccccgaagggagggaggttaattactcttttaatttttcccgaatctcattcatccggtcaagtatgtcatttattaatgcttctctttctttttcattttcgggaaccccgtaggcttcgtgaaatgaagcgagaagttttaaattctcatactcttgttctaattcctttctttcttcatctttcattggttaaacattaaaattaagaactcttatttgactctacaaagataataagcatttgcttattatgcaagtttttggcgaattattttagtgaattaatataatctattacttttctattcgctttatctatttgctctaaatcgtaatctatataaattccggttgttttgcatccgaactcgtgccccaaagctaaagatattacatctttcgatattcctattttatgcgctattgtagcccatgtatggcgcgcccaatacgaggtgatgtcgggaaataaaatatctctaatctttttcccgcctaatccttttcgttcgaaatttcccagtttttgcaaacctctattcattgctgccatatactttctataattgtaatcgttggtttcgagcgtgtttagtagaaatttatttcctttatacctgtttattatctccattgtttccggttctactttgatagagtatagctttccggttttttctcgtttatattctatgcgtccgtcaactatttgcttgaggttaaataagtctattgcgtttattccgattagataaaacataagcatgaatatgtcttgatactccttttgatattcttctccgttgaaatctcttagggtaataagttgatccggctttaacgatcgttttctagtttcctccctttctattgtgaactttctaaatggatatagttccgtttcctcattatctatcgcgtgattgaaaaccgccctaatattccttaaatggattgaaatcgagtttgtttttattccggtatcttttagccatttattgaacgattctagccatttccttgtcatcgtttcaaatgtacaggtcggatcataggcaagaatcttattttttgtagctttatatagaacgattgtattttcttttgtttttgtagctacaaactcatctatatagcttacgaaagttttacaggtagattcatttttgatagattttagaatgtagtcttttaacgctttatcgctcattccttttaacttctgattatcgtcaagtataacaagtaacatttcaacacgattaataagattccgaatcgctacgttcttagctttatgattctttgcgttcttattatactctgtgcccgtccatgtttccggtgtagcgcaaaaatcagtacataacattatttgccctttgtgtctgacttgtagtttaaccggaaatgtcccatctttcttttctctgcgagtgtctaagtaaaaactaattgttgccatattattatcatttttagtatatatacgcaaacaacgtattaacgggatagcgcgataataatgcaagatgaaaatttgcattaaatttgcattttttcttttgaaaatacccgttaataacgcctaaaaacgatactttgatatagatatagggcaataaaaaagccccttacttgttagtaagaggctgataatcagatagtagtgggtacgagaatcgaactcgtattacatgcgtgagaggcatgtgtcctaaccgttagacgaacccaccggagtttgatagatttaaaaagagccaagtctataaaacttagctctttttattttgagattttgcggaagctgggggattcgaacccccggtacccttacgagtacgtcagtttagcaaactggtggtttcagccactcacccaaacttccttgaacccgcattctctctcaaatgcggtgcaaatatagggggaacttttggactacgcaaatcttttagcaagattttttttacctgttttttgtgaaatgagataacctgctatgtttcaaatgttaaacggaagaaatttttttcgaaagcttttaatttttatcgatggaatgggaacttgaaacatattgacgctatccgcttattatagtgacggtatcttcatgggatagggtaaacatccggatgggatagtgacggtatatttgacgtgagaaaaggacataaaaaaaggctatctatcccagacagccaatcttttgttaaccttaaatctaatactatgaaaaacacagtacaaatatacggacttctgtcgaatttgcaaataaaacaagaaaaaagagatgttttataacattgattaaatatttgattcttcaattctatttttattaagactttcagcgttttgaacactatattcccaatatttatcacataatttcagataactggtctcggcacttttgcctcctaaagaaatggcatacatctttgtctgttttgcttttgcatgttctatggactgggatagcagtttatcgattggacgcatctcaaaatccgatacggtgatgatgtctgcttccatatatccttcttcgctgatctttcgcaaagcatgtgtgatgactggttccatatctgtgccaccatgaaaagattggcttagaaaatcgacaaggcgatcgaaactactccctaaatcggttatttcaatacactcgatatcatcggagaagaggatgacgtaacatttccgatgttgtacttctgtcaattcggcaatggcaagtagagtagattttgcgattctttcccgttcgcctgccatagaaccggaagtgtccaggcaaacgatgaaagggccttcagcttcttcggaaacttcatttcctactgttttcttatcattgatggtttgtttctcgtgcgattgataatcgatgacttgtagtctcttctctatgaaacgctcgaaaaatatgggttgcaggttcttttccgccagataacaatattccagagggagaagactattcaaatcgtttccttcacaaatgcctgcaatatcacttcgggtggcatgagatataatttgttcccggtgaatacctgcggtcattttgaaacgtttccggctactttggtgttttttgcctaagatttctaccagttcgcggataacgggatttcgtttgatcgtttcttcgtattctaaaatctgttccgctatctgtttatgattgcgaagtagccagacgaggcgtgagccaccgcgtaccggaagatttttggctaatgccagttgaatacggtagaaatcctcacagagttgctcgatatgttccatctgatagttgaactcattgttcgagagtagcgtatgccacttgtcgaaaaaaagagtccgcaacgctttccattctttggaacgcgggctgattgcattaaaacgttggaggtagtattttacgttgaggtctaccaggtgatatttcatggagaaggggtatgcgctgtttttcaggaattgaagaaactttgcgtccgatgcttcattcatttcatgaaagtattcccattgcgatgcataacgggagtagaaatcttgcagggagggttgtgtgtgacgaaaatacaggtgaatgtccgcatccagttcttcgggacggataatcagattgtgtagttgttcgttgtacacatcataggctattccctgcaatttttcgtaataaatgtcttgcaggtgcttgagcctaatactctctgttctcttgttcatgggcatgagcgatgatgcgaagttcgttccggtagttctctatgatatgtgcagtttcccctaagattcgcttaattttgcttttttgcgatgaacttaagaaaagatgttcctttgtatatgctgtttcccgctcggagattgttttatattctacctccatttgataaagtaaatctatcacttcctgcaatgtaaattcgaacggagtactgccgtcctgctgtgttggcaaaggttcgcaattatcataacatagtagtggatactcctgattgttgacgaaaacagatcgtttcccttttcggagggaataaatattcttttgtgcgatattcctgttctttacgaaatcgtaggctttcaggattttgttgaccggacggaatttatcctgttggatataaaacaaccggttgctgtctttcctcaaagactggtaatccgaagcaaagatgagtaaatttccggcaatgtggtaaccttctatgcgatgatagaaggtatctacgacctggattcccggatcgctaagttcccgtaggctgtgttcggacttcatgttttctttcaatgtatccagtttctgttccagtcgtttttctcccaataaatatgtattgattccccgtgcaatcgactgttccactatgttttcgatgatggggagctgcgaaacttcatcccacagacaggcactcatcagcaagcagtcggagaagtgaattcccggagattcgttcagataggccgaggtgcggagcagacctactatttttttccaacggcggtcggatatatagatcggaggggtgttttcatcccgccctgtattatattgttcgatttctcgtttgatattgtgaatcagctcgaagatggtatagtggatacctactttctcactttcagcttgtatttgattgtataattcatcgtctacctggagttttgccgggatttcaggttctacttcccgtgtagaagaaatcatctggtcgaaagcatattcctgttcaatgcatccgacaaactggcggatcaggaaacggtcgtatagggcttccagtccttcaccttttgcgggtagttcgttggacgcggcaatcagcgctttcagaggaacacgcaccgtaaattgtccgttgcgatatatcttttcattgattactgtcaaaagagaattttggatagcaggaccggctttccatatttcatccaggaagacaatcgatgctgtcggcaagtatccttttgtaatacgttcgtatgtatcttcatctttcaattttgagatggagacggggccgaatatttcatccggtgtactgaaacgagacatcagatattcaaaagcatccgcatctttaaaagccagtttgagcctgcgcgccactaagctcttggctactcccggagggcccaatagaaagatactttcacctgccatggcagataatagggagagtgcgatggtatgttctttttcgaatactccctcattgagggatttcagcagttgggtgatatgggatttgattgacttcatgcgacagatgatttcatgtgttgttagcaggaggcaaagatacaagaattctttgaaatagacttcattggggggatttacccctagatttaggcaatttcctcccgataagtaggagttttcagtttcataaggaaaattcattctctacttttgttctatcgaaagataaatgatagataataattagagaaccgttaaaaataaaggaatatgaaaacgaacacatttaaatacttcggtttggctttgatggctatatttatggtaagttttacctcttgcgaagtggaaatagacagtttctatgatgatgataataatggtgcagggtactataatcgttcggctgatttgtgtagccgtacctgggttagtttctaccgggacatggacggtaactattgtcgtcaggaactggatttctttttagatcgtacaggaattgactatatacgggtggaatatcctaacggagcagtagagcagtatgaatataatttccgttggagctgggagaattatgcgcagacttccattcgtatgtcatacggaccgaatgatgtttcatacctggatgatgtgtacattggtggaaacaggttaagcggttatctggacggacgaaataactttgtagagtttcaggggaaatgatgaaagataaaacggaaagaaacagagggaaaaaaacgtttgatggataacaagatgcaggtgaaaagagaaggataagatagttaagatagaaataggatagttattaggaacaaaataataggtaacgaagtaaaagggtaatcaataagatttcaggatatatgattcagggtataaatagggcgcgaaatgaaagcttaaaagttttgaaccggactaaatagtttttatctttgcgccctattagtttttatatacatggagtggttatatagtctatttctcgaacattctgccttacaggctgttgtggtactttcattgatttctgccattggtctgggcttgggaagagtgcatttctggggagtttccctgggagtcacttttgttttttttgcaggcatcctcgccggccatctcgggctttcggtcgatccgcagatgttgaactacgcagaaagtttcggactggtcattttcgtttattctctcggtttgcaagtcggtcccggtttctttagctctttccgcaaaggaggggtgacattgaatatgctggcattgggagttgttctgttgggaacattgttgacggtggtggccagttatgcgacaggtgtctctcttcctgatatggttggtatcctttgtggagcaacgacgaatactccggcgttgggagctgcacaacaaacattgaaacagatgggaatggacagcagtactcctgctttaggatgtgcggtagcctatccgatgggggtagttggtgtaatccttgccgttttattaattcgcaaagtgttggttcgcaaagaagacttggagataaaagagaaagacgatgcgaacaaaacctacattgcagcgtttcaagtacacaatcctgctattttcaataaaagcatcaaggatatagctcgcatgagttacccgaagtttgtcatctcccgcttatggcgtgacggacatgtaagtattccgacttctgacaagatattgaaggaaggtgaccgtttgctggtggtaactgcggagaaagatgctttggccttgaccgtgctttttggtgaacaggaaaatacggattggaataaagaggacattgactggaatgcgattgatagtgaattgatttcgcaacgtattgtcgttacccgccctgaactgaatggtaagaaactcggttcactccggttgagaaatcattatgggattaacatcagtcgcgtttaccggtcgggtgtgcagttgcttgctactccgggattggtacttcaattaggagaccgcctgacggtagtgggagaggctgctgctattcagaatgtggagaaagtacttggaaatgctgtaaaaagtttgaaagaacccaatctggttgttgtgtttatcggcatcgtgcttggtttggcattgggggctattcctttctcttttccgggtgtcagtactcctgtgaagctgggattagcgggtggaccgattatcgttggtattcttctgggaacttttggaccgcggatacacatgattacttataccacccgtagtgcgaatctgatgctgcgtgccttgggactttccatgtaccttgcttgtctgggactggatgccggagctcactttttcgacaccgtattccgtccggaaggtttgttgtggattggtttgggagccggattgactattgttccaaccgtactagtggggtttgtagccttcaagatgatgaagatcgatttcggttctgtatccggtatgttgtgcggaagtatggcaaatccgatggcactgaactatgtaaacgatacaattcccggcgacaacccatccgtagcctacgcgactgtttatccgctgtgtatgttcctgcgggtaattatcgctcaagtgctgttaatgttcttgttgaattgagaattgaaaatagagaaatgatggatttgtaaataaaaagtagtcatttcttaatcaggaatcgtataaaatagataaatttgtaacaagaaaaaggagaggaattaataaattccttttttgagttactaaatggtaagttgtcaactaataataagttgccaattaataaattgtaaatagtaaaatagtaaataaaatgactgctcaaagtaacataactcctgaaagcattgtgagtgatctccgttacctgcaactgctttcccgaagttttcctaccattgccgatgccagtacggaaataatcaacttagaggctatcttaaatctacctaaagggacagaacatttcctgactgatattcatggagaatatgaagcttttcagcatgtactgaaaaatgcttccggtgcggtaaaacgtaaagtaaatgaaatattcggcaacactcttcgtgaagctgaaaagaaagaaatctgtactttgatttactatcccgaagagaaactccaattggtgaaggcccgtgaaaaggatctggatgattggtatctgattacgctgaaccaactggtgaaagtctgtcagaacgtgtcttccaaatatacccgttcgaaggttcgtaaatcactgcctgccgaattctcttatatcattcaggagttattgcacgaatcgtctatcgaaccgaataagcatgcttatattaatgtaattatcagcacaattatcactacgaagcgtgccgacgatttcattatcgctatgtgtaatctgattcagcgcttgactattgattctcttcatatcgtaggtgatatttacgaccgtggtcccggtgcgcatatcattatggatacattgtgtaattaccacaacttcgatattcaatggggaaatcatgatattctctggatgggagcagcttccggtaatgatagttgtatcgctaacgtgatacgtatgtctatgcgctatggtaatctggggacacttgaagacggatacggaatcaatctgcttccgttggctacttttgcaatggatacgtatgccgatgatccttgcacgattttcatgccaaaaatgaactttgccgatgctcattataatgagaaaactttgcgtctgataactcaaatgcataaagccattaccattatccagtttaagctggaagctgaaatcatcgaccgtcgtccggagttcggaatggctaatcgtaaacttctggagaagattgattttgaacgcggcgtctttgtatatgaaggaaaagaatatgctttgcgcgataccaacttcccgactgtagatccggcaaatccttaccgattgactgaagaagaacgcgaattggtagaaaagattcattattcatttatgaatagtgagaaattgaagaagcacatgcgttgtctgtttacctatggcggcatgtatctggtttcaaactcgaatcttctttatcatgcttctgttcctctgaatgaggatggcagctttaaacatgtcaaaatacgtggtaaggaatactggggacgtaaattgttggataaagccgatcaactgattcgtactgcgtacttcgatgaagaaggagaggaggataaggaatttgctatggattacatctggtatatgtggtgtggtccggaagctcccctgtttgataaggataagatggcgacttttgaacgctattttgtagaagataaagagttacataaagaaaagaagggctattattacaccttgcgtaaccgggaagatatttgtgaccagattttgacggagtttggagcttcagggcctcattcgcatattatcaacggtcatgtgcctgtgaaaacgattcagggagaacaacccatgaaagccaatggcaagcttttcgttattgatggtggcttttcaaaagcttatcagccggaaacgggaattgcgggatatacgcttgtttatcattctcatggtatgcaactcgtacagcacgaaccatttcagtctcgtcagaaagccattgaagagggacttgatatcaaatcgaccaacttcgttctcgaatttaattcacaacgaatgatggtgaaagataccgataagggaaaagaactggtgactcaaatacaggatttgaagaaactgcttgttgcttatcgtactggtctgataaaagaaaaagtgtgatatgaatgctatttctttgcaatataaaattcaataatttttagtgtcttgagtgattcgttccacctaggtgggactaaacagcgacctgggtgggacgaaaggaaaaccttggtagaacgaaacaatcatccaggtggaacgaattataattagtaaagcaatgccttgatattagtgttttaatcttttcagcagtgtatcttgcccgactcctgtttagaaaagaacaatgcctgcttctataatcgctcctttatcgtaattactcgatttattatagaatctggttagcccataaccgcctgttgcaaagataccgaacttcctggtaaattgatattccagattggcacgtgcctgcaatgcatataaacgtttcggaatcacctcgtctttgttatcgaaagcctcgatatgctggtagccaaggtctccgctgatggataagcctttgtaaagagggaaggataaaccggcacgataggatgcacttgccgaaaacttatcattcaatccttgatacatggaaccgactcccagaatggtataaaacaattggttcttgaatcgtacacctatattggcaggcgtagcatttccaccatacaccatcatttgtactcttgtatcaggattcgcattaaccaatccgagttggaatcctttcatgtcttccttgtaataattgacaaggccaatttgaagtccgcgggcctgcgttgcataattacataatgctatttgcatcccattcagtttcgatgcggttatattggcaattcctgctatctgcaagccgttcatgtgttcgcctaccacattcaaaagtccggaagccatcaaaccgccgaagctctgccctgtaatatttgccgctccggaaaagtgtagccccgaagccatgttgcctgtcacattcatgaaaccactaatcattaaccccgagttgttgtctcctccgatgctcgttaacccggatatgactactccctgtgctctgtcgccggtgatatttaccaatccggcagcagaaagttctacggtgttatcgccactgatattactgataccggccagctgaacgccccgcatagtaccccctgctaagttggctaatccggtgatttgtattccgttcatgtcgccatgaaccacacttcccaacgcattgatacccacaccgttcagacggttcattgtagacaggagaccgatgtttatgtatgtcgtctgtgtactgtcatgaggttgtgtacatatatctttccagatggatatattgatacctgcactcttgttctgtgccggtaaagaaacggcagccattagtatagctgccgtaagtattgttttctttatcttcattcctttctctttttcggtttaagtaatatcttatgcagctaactttatattagccttttgcttcctgatataagtaacgtttgatgctcttcttcggtgtcttttcgaattcttccggatagattttcatcttggatatctggctgtaagccggtagcatagtatttaaagtcacacggttttcttccattacttgctcgatgtcttcattcttcaggccatgagcgaaagcgtcgtcaaaatctggataaacaagtccgacaagtttctcgttttgctgaacgataatactttcagccacgtatggcaggttgttcaacttatcttcaatttcttccggatagatattctgtccgctggcgctcaataacaggttcttgctgcgtcctttgatcgtaacattaccttcttcatccatcaaagccaagtcgccggtgtgtaaccaaccgtccttgtcaatgacttcttgagtggcttcttcgtttttgtaatagcccaacatcacattcgggcccttacatacgatttcaccaacgatattttcgggatcagatgacaatacccgtacatccatccgtggtacagcctttccgcaagaacccggtttgaactttctccaatcttcgtagcagataatcggaccacattccgtcattccatatccaaccgtataagggaaatcaatcattttcaagaactgttccacttcctgattgaaagcagcacctcctacaataacagctttgaagtttccgccaaatgctttaatcatttcttcgcgcactgttgccttaatcttatcattgataataggcactttcagcaatatcttcatcgccggagtttccaacttcggaagtacgcttttcttgattatcttttcgatgataagcggtacggcaacgattagactgggtttcacttcttcaaaagcctggaagataatcttagggcttggcatacgggtgaggaagtagatgtgacaacctacggagaactcataaaggaattcaaaagccaatccgtacatgtgtgccataggaagcatggaaacgattttatctccggcttccagttccaacacttcaaaagcaaatttggtatttgaccacaggctgcggtaggggagcattactcctttggaataactcgttgttcccgaagtataattgataactgccagttcttccggttcgtctttatgatatgcgacatgttctttacggaaattcttcggatattttttgccgaacatttcgttcagatgttcgcgtgcataagtcagtcgttcgctgcgtgacactagcagggtgaagtcgttcatcatcaggataccttccaatagcggcattgccgactcgttcaggttttcccataccatatctccaacaagcagtaacttggcttcggagtggttgacgatattatgcacattgtctgctttaaattcatggagaataggtacaataacggctccatacgttagtgtggcaaggaaagtaactccccagtgagagctgtttcttccacaaacggcaatcttgtctcccttgcggattccgctttcttcgaagatgatatggagtttctcgattttgcgagctacgtctttatactgtaaagttgcacctttataatcggtcagggcatccaggtcccaattatttttgatactattctcaatataggctataaaactttgttccattgttttttgcacatttggtattaaattgtgcaaatatagcaattatattaagaatgaagaattaagagtgaagattttttggaaatggagggagagtgtgggaaggaatttgtggacgatgcgttattagtgcaatggatgatgcttataattgaataaatgatgcttatggttgaataaatgatgcttagttggatgaaggcttataaacaaaaaggattagcttgtgataaaatagattagctcatggcataaacagattaagctatgagctaaatgaatatcattatagctaaaaaaaatatgctattagcaaaaataattcagctaatagcatatttacagtaacttcatttcttatttcaagtaccattcgtacattctctgtacgccttcctcgatttcaattttgtggtgccagcccagtgcatgcagttttgaaggatcggttagcttgcgcattgtgccgtccggtttgctgctgtcgaaggtcagttttccttgataacctacagtctccacaatacgctcggccagctgacggatggtgatttccttaccggttccgatgttgatatggcagttgcggatatctttgctaccttctttataggtatctttgaagtctacgtgctccattacgaagacgctggcatccgccatttcttcgctccaaaggaactcgcggagtggagtacctgtaccccaaagagtgacttccgtttcgctgattccgtatttttgcagaatagccaggatttcttctttcggactgttgccgttgacaccttctactggacgcaggttcatatccttacgtacagcttcccagttcccttctttcagacagtgtgccagatgaatcttccggatcatggcaggcagtacatggctgcgttccaaatcgaaattatcattcggtccgtaaaggtttgtcggcatcacggcgatgtagttcgttccatattgcaggttgaagctctcgcacattttcagtccggcaattttggcgattgcatacggctcgttggtatattccaacggtgaagtaagcaatacgtcttccttcatcggctgttcggcatcgcgtggataaatacacgtactgccgaggaagagcaactttttcacgttgtgacggaaactctctccgataatgttctgttgaatctgcagattcttgtatataaagtcggcacggtagatgctgttcgccatgataccacccacaaaggcggcggcaaggaatacatattccggctgttcttcatcgaagaatttacggactgccatgccatccagcaggtcaagctctttgtgcgtgcggcctatcagattggtatatcctttatcctgcaaattcttccagatagcagatcccacaagtccgcggtgtcctgctatatatatctttgcattcttttccattctatcttttattagttcaccacagaggacacggagggcacagaggaaaaaataaaatcctccgtgtcctctgcgtcctctgtggtgaaatgaaattcatttaatgtttggtagcaatcattcgcttcaccttttccatatcgtggcgaaccatgatacttaccagttcttcgaatgatgttttacgtggatcccagcccaacagtgtttttgcttttgtcgggtcgcccaacagttgttccacctctgacggacggaaatatttaggatcaacttctaccagagattttccggtagctacgtcaatacctttttcatttacgccttcgccttcccaacgaagttcgatacctgcttccttgaatgctaacgttgcgaattcgcgcaccgtgtgcatttctccagtagcaattacgaaatcttcgggaacgtcatgttgcaggatcagccacatacattcgatgtaatccttggcatatccccagtcgcgacgtgcatccagattacccaggtacagtttgtcctgttcgccctgtgcgatacgtgcggcagcaagcgaaattttacgtgtaacgaacgtctcaccacggcgttcgctctcgtgattgaacaaaataccgtttacagcaaacataccatagctttcgcggtagtttttagtaatccagaaaccatattgtttggctaccccatacggagaacggggatagaatggagttgtctctttttgtggaacttcctgcaccttaccgaacaattcggaagtagaagcctgatagatgcgggttttcttttccagtcccaggatgcgtacagcttcgagcatacgcaacgtgccgatagcatctgcttcggcagtgtattccggaacgtcgaacgaaaccttcacgtggctttgagctgcgagattgtagatttcatccggttgcacctgttgaataatacgaattaacgaactagaatctgtcatatccccataatgcagattaatcgtacgtttctgtttcatgtcgcgcacccactcgtcaaaatacaaatgttcaatacgtcctgtattgaacgaagaagaacgacggagtataccgtgtacttcgtaacctttttgcaatagaaattcggcaagataagaaccatcttgcccggtgatgcctgaaattagggcttttttcatacgctaattatttatataattgaaaatgtgggtgcaaatgtcggcattttttgtgacccagccaagtgactttccaattatttttcagcacagtcattcagcacggttttttcccattattttgtcgataatcaaagcgatagctccgtctcccgttacattgcaggcagtaccgaaactatccatggcgatgtaaagcgcaatcatcaaagcttgtgccgattcgtcgaaaccgagcatggattgcagaatccccagggaagccatgattgctccacccggaactcccggagcagctaccatagtgatacccagcataaagataaacccggcaaacagggggaagtcgaacggcattccctgcatcatcatcaatgccagtgcgcaggctacaattttcagtgtactgcccgatagatggatggtggcacatagcggaatcacaaatccggctacttcagcagatactccgttctttttggtctgttccagtgtcacgggaatggtggctgcagatgattgtgtacccaatgccgtgaagtaagcgggcagcattttgctaagcaatttgaatggatttctatgcacaaacaatgccgcaatggaatactgaaaaaccaacaggaaaatatgaagaacgaagatgactccgataattttaataaacaccatcaggatagaatatacttgtcccgaatgtgtcatgttgaggaatatgccgaagatataaagcggtagcaacggtagaatgacggcacttatcattcgtacgataatttcctgaaaatcacgtgccacatttttcaatgcgtcgctgttgagtgacgccagtcctaaccccagtgtgaaagctaaaaccagagctgtcattacgttcatcagtggcggaatggagacggagaagtaggggaggattccctgcgcttcgcttacttcttcaagtggtgcacccggttcgatgagcgaaggaaatactgtgactcctgtgaagtaggagagaaagcctgaaaaaagagtagcgaagtaggcgatcaaagctgtcacgagtagcatttttcctgcgccttttccgatgtcggcaatagccacagtaaccagtccgacgataattaatgggatagagaaattaagaaattcactgaaaatgccattgaacgtaacaaatattcgcactagcggagccgggaaaactgtgccgatggcaatacccaaaatgatggcgataacgatgcgtgccaacaaaccgattttgatcttcttcatccttgattttatttgtagaccacaaaaataatattttaatctaaaatattgcgaacaaatgtgcatttcaaatgttactaagataaagaatattcaaaatatacaagttatggcaaatcagaataaaacagatatcggacttatcggcttggctgtgatgggcgagaatcttgctttaaacatggagagtaagggatggcacgtgtcggtttataaccgtactgttcccggagtagaggagggggtggtagaacgcttcctgaatggtcgtgcaaaaggtaaaaacatcgaaggattcacagatataaaggcatttgtagattcgatagctattccccgtaagattatgatgatggttcgtgccggaagtccggttgacgaactgatggatcagcttttcccgttgctttcaccgggagatatccttattgatggcggtaattctaattacgaagatacgaaccgtcgtgtccaactggcggaatcaaagggatttcttttcgtcggtagcggtgtgtccggtggtgaagagggagccttgaatggagcttctatcatgcccggtggttcggaaaaagcatggccggaagtgaaaccgattcttcaaagtattgcggcaaaagcaccggacggcactccttgttgtcaatgggtgggtcctgccggctccggtcattttgtgaagatgattcacaacggtatcgaatatggtgatatgcagctgattgccgaagcctattgggtgatgaaaaagctgcttgatctgaccaatgaggaaatggctgatgtctttgcccgttggaacgaaggcaaacttcgcagttatctgatcgaaatcaccgccaacattctgcggcataaagacaaatccggaggttatctcattgataaaatcctggatgcagccggacagaaaggaaccggaaaatggtcggttatcaatgcgatggaactcggtatgccgttagggctaattgccacagcggtattcgaacgaagcctttcttcacagaaagacttgcgtcacctggcttccaagcaattccagtgtcaacatacacaacctatatataataaggcggaactcgtaaagaatatcttttctgctctttatgcttccaaactcgtctcttatgcccagggattcgccgtgttgcaacgtgcttccgacgctttcggctggcatctcgacctggcttccattgcgcgtatgtggcgtgggggatgcatcatccgcagtatattcctgaacgatattgcagctgccttcgaagccaccgacaagcctaaacacttgttgttggctccttattttaaagaagaaatgaagacattgcttcccggatggaagagcctggtggcggaatccatgaaagaagaacttcccgttcctgctttctcctctgccctcaactatttctattcgctcacttctgccgatctgcccgccaaccttgtacaggcacaacgtgattatttcggtgcgcacacttttgagcgtaaggatgagttgcgcggacagttctttcacgagaactggacaggccacggaggagatacgaaatcgggcacctataatgtttgagtaaacctataattcatatttagaaattaataaagtggataaatttgcaatgataattttcggtgcgtcaggtgatttgaccaagcgtaagctgatgcctgccctttactccctctaccgtgaaaaacggttgaccggagagttttccatattgggtatcgggcgtacggtctattctgacgataactaccgttcctatatattagaagaactacaacagtttgtcaagtctgaagaacaggacacagctcttatggcttcatttgtctcccatctctactatttaccgatggacccggcaaaagaagaaggttacccgcaactccgccaacgtctggttgaattgactaatgaggtagatccggacaatctgctgttctatcttgccactccgccatcactttacggagtagtgcccctctatttgaaagctgccggacttaacactccccactcgcgcatcatcgttgagaaacctttcggctatgatctcgagtcggcacttgaactgaataaaacgtatgcctctgttttcaatgagcatcaaatttaccgtatcgaccattttctcggtaaggaaacggcccagaatgtactggctttccgttttgccaacggtatcttcgaacctctctggaatcgtaactatattgactacgtagaaattacagccgtagaaaatctgggtatcgagcaacgaggcgggttctatgaaacggcaggtgcgctacgggatatggtgcagaatcatctgatacagctcgtggcccttacggctatggaaccgcctgctgttttcaatgcagacaatttccgtaatgaagtggtgaaggtctacgaatctcttactccattgaatgatatcgatttgaatgaacatattgttcgcggacaatatacagcctccggtagtaaaaaaggataccgtgaagaaaaaggagtggctcccgattcgcgcacggaaacttatattgccatgaaactgggcattagtaactggcgctggagtggcgttccgttctacattcgtacaggtaaacaaatgccgacgaaagtaacggaaatcgttgtgcatttccgggaaacacctcaccagatgtttcattgtgctagtggcaactgtccacgggctaataaattgatccttcgtttgcaaccgaatgaaggaattgtgctcaaaatcggaatgaaagtccccggtgcaggtttcgaagtccgccaggtgacgatggatttcagttatgcacagttgggcggtgtgcctagtggtgacgcttatgcccgtctgatagatgattgtatccagggcgatccgactttatttactcgaagtgatgcagtagaagcctcatggaaattcttcgatccggtgctccgctattggaaagataaccccgatgcgcctctttacggttatcccgcaggtacgtggggacctttggaaagtgaagcaatgatgcacgaacatggggctgactggacgaatccttgtaagaatttgacaaatacagatcaatattgtgaattatgaaactatcagttttttcctcatcaattgaaacttcacgagcattgatactccgcctggtggaaatcatgaatgaagagccggacagagtgttcaatatcgcagttagtggtggtaatacccctgctctgatgttcgatttatgggcgaatgaatatatggaaattaccccttgggaccgtatgcggatttattgggtggatgaacgttgtgtgcctcccgatgattcggacagtaattacggaatgatgcgcaaccttcttttgggtatcactcctattctctatgagaatgtattccgtatccgtggagaggcagagcctgcgaaagaggcggttcgttattcggagttagtccggcagcaagtgccgtttaagcgtggttggcccgaattcgatattatactgttgggagccggagatgacggacacacttcttcgatctttcccgggcaagaagatttgctgacttcaaactctatttatgtggtcagtgcacatccccgtaacgggcagaagcgtatcgcaatgacgggataccccattcagaatgcccgctatgtcattttcctgattaccggaaaaaataaagccgatgtagtagaagaaatctgtaattcgggagacactggtcccgcagcctatgtggctcatcatgcgcaaaatgtagaactgtttatggataaaggggctgccgcatatattgaagatcctaataaaaagatgagttagaacagaactatttcattgacgaaactaatagaaaaaaagaaaaatatgaatccttatcaacattcatttggtggtaatatcccacaagacgtagcggggaaacaaggcgaaaatgttatttttattgtttatactttaaaagattcgcctgaaactcttggcaaagtaaaagatgtgtgtgccaatttctcggccctgattcgcagtatgcgtaaccgttttcctgatatgatgttcagttgtaccatgggatttggagccgatgcctggaaccgtcttttcccggaacagggaaaacccaaagaactgaaaactttcgaagagataaaaggcgagaagcatacggcagtttctactccgggcgacttattgtttcatatccgtgcaaaacagatgggattatgttttgagtttgcatctatcatcgatgagaaacttcaaggcgtggttgaacctgtcgacgaaactcacggtttcagatatatggatggcaaagccattatcggctttgtggatggaacggagaatccggcggttgatgaaaatccctatcattttgcagttgtaggagaggaagatgctgattttgcaggaggcagctatgtctttgtgcagaagtatattcacgatatggttgcgtggaactccttacctgtggaagaacaggagaaagtgatcgggcgtcgtaagtttaacgatgtcgaactgtctgacgaggagaaacctcaaaatgcgcataatgccgtcactaatattggagatgacctgaaaatagtgcgtgccaatatgccgttcgccaatacgtctaagggagaatatggtacttacttcatcggctatgcaagtacgttcactactacccggcagatgttggaaagtatgtttattggcaatccggtaggcaataccgaccgtttactggactttagtacagcagttacgggaacacttttctttgctccttcctacgatttgctaagtgaactgggcgaataaaaaataaaagactggggggagtattacactttagtaatctcctccactacatattggtcttttactttcttgcaggtacatacgaagaattccggatgtttcagagctccttgtaaagtatcaggaagaatcatttctttagtacgacggtccattgcaaccgttgcatacaggataccttcactctcgcatttctctattaatgcactttttagttcttctacgctatattccatttgtgtgatcctttgtcgctgcaaagttatggaaaatatgtatattttgtgcaattatattcctgtaataaataaaaaaatagctccctagttcgtccgccgacgagggagctattaacacaaaaactaaactagacttaactaaactattctattcttggaatttcacaatccctttctgttcgttgcaaaggtagatataaaacgggttttgacaaactataatcgacaaaattcacttttttaccgataaattcatgaataattagctcctttcgtcaagaaaagtctgaaaaacttgcttgtaactatcgctgataggaatatatgtcttgtcaaaaacaatacggccgcggtcgatcacgcgtatcttatctttttgtacaatgaatgagcggtgcacgcgtatgaaacggctggacggtaaaagttcctccattgctttcatactcatcagtgatagaataggtttggaagcatcttccgtatatattttaatataatctttcagtccttcgatatacatgattttcttcaagtccacttgcaccagtttgtagtcacttttcacaaaaatactgtctatctcttccggtttctgtacaagttcgaaccattgaagggccttgttggcagcttgcaggaaatcgacgtaggagattggtttcagcaggtaatcgagtgcattgacacgataaccgtcgatggcatactgtccgaaagcggtagtaaacacaatacgggtgtgcggatctaccatcttcgaaaactccaaaccattaagctctggcatctggatgtccagaaacaggagatcgacctcttcgccaggcaattctttcattgcctgaaccgcactggaatactttcctacgagttgcaggaacggggttttattcacgtaactctctaacaagctaagagctaacggctcatcgtcaacaattgcacaacgtaacatcatactattttatatctaaagtttttatattcaatgttttgaaatctactctctgatcttgatacttaatttcgattcatatactttttcatcttttgagatacctttcgaccaggtataagccccgggataaagaatctccaaccggcgactgacttgctccagtcccacacccgagccacttttatcctccactgtctttggatgattactgttgcgaatttcgcaaatcacctccttatcattctccgaaagatgaatactgatgaagctcgattcagtaggggagatgccatgcttgaaagcattctctatcaatgagataaagataagcggagcaataagcgtctgactgtcgggctgaatatcaaatttagtaatcatctgtacattggccgacaggcggatgcgcatcagttcaatgtaatttcggataaaatcaacctctttacagagaggaacgtacgtttgttggttatcatataacacataacgaagcagtttgctcaactcctgaactgcttgttgcgctttgtccgaatcaaatgcaatcagtgcatagatattattcagggtattcagcagaaagtgagggttcagttggtttcgcagatttttcagttccgcttccgcacggtttcgttccgcttctttgcgggcagcttcattttgcgtccatcgcgcgctcatacggatagcggcacttaggccgatagtaaatacgaggctcaacatatctctaaggaagaatagccatcccggaggcatacccggtcttttggctttgggtgcatatgacggatcgaatgtcaggctttgccagagatgtaacaaaatgccgatgacacataaaaagataatgttgtagacgatatatcttttggcctgactctgaaacagataacggggaacaagaatgaaataattcacgtagaacgcaatcataaaagagagtggtacagcaagatggcgtatataggccatccagttaatgttcccgtttccacgttcaacgaagaagaacgggaaaccgaacataatcccccagctgataatgtgtatcagtatctccaggggacgacgtgcggatgtaaaggtttgtttcataaagacaaagataatttttttaattgacaaccgacggttgtcaatcaattattcgtatctgatggcttctatcgggtctaaatcagctgctttcttagccggataccatccgaagaagacgcccgtaacggtacatactgcgaaggaaaggaatacactccacggctggatatagataggccaatgcgctacgctcttgacaatccagctagccccgcaaccgataatcactccgatgatacctcctgtgatactaatcatgatggcctcgataaggaattggcttagaatatcgactccacgtgcaccgacagacatacgcagaccgatttcacgggtacgttccgtaacggatacatacatgatattcataattccgataccacctactaccaatgaaatacctgcgatacaagccagcagggttgtcatcaaatcggtggttgagttgagcattgtactcaattcctgttgggtacggatagtaaaatcatcgtcatccgaagctttcagtttatggttgcgacggaggatcgtactgatttcgtcagtagcataatccgtcatatcttcggtaagggcggaggcaaacactccctgcaaatacgtgacggcaagcagacgtttcatcactgtggtgtatggtgcaagcactactgcatcctggtcttgtcccatggagttgtagcctttggctttaagcacacctaccacacgaagcggtattttactgaaacgaataatcttacctaccggatcacttccgtccggaaaaagattgtctactatagtctttccaatcacacatactttcgccgaactctgtatgtcggcctctgtgaacatctctccgttttcaacagtcagctggcggatgtcgaggtattctgttccgacaccgttcacggaagctgggtagttgttgtttccggcaatgagttgccccgatgatgaaacattgggactgatggcggacaggaaacttgtctcatcacgcaaggcttcgtagtcggcaagcttcaaggtttgcatagcagacgggtcttggcggacacctccacgcatatcggctcccggatgaatcataatcatgttcgatcccatttcggaaatctgctgctggatgcttttcttcgaaccttgtccgatagccagcatcgtgatgacagaagcaacaccgataatgataccgagcatggtgagaaaagcacgcagcttattgttcgccaatgcccggagagctatcttaaataaattagttccattcataatgaataatttgctaatttgtctatatactaatggggcaatttcctgaaggtatagtcacccaacctgtttattgtacagcaatcggcacattagtatatcggcacattgaataattattaatcctcgtcgtttttcggcaatgcggccagcgcttcggcagcagacagaattttcggattggttgtatcttctataacctgaccgtcacgcagacggatattccggctgctatattgcgaaagttcgggattatgtgttacaaagataatcgtacgtccctctgcatgaagcttttgaaacagtacaagtatctcgaaagaggtacggctatcgaggtttccggtcgcttcgtcggcaagaatcactgccggattgttgaccaatgcgcgtgcgatggcaacgcgttgcatctgtccaccggacatctggttggatttatgttccagacggtctcccaatcctacagcctgtagggactcgatggcgcggcgacggcgttcggaagcgctcacggcagagttgtacataagcggtagttccacattttctacagccgtcgttttaggtaacaagttgtagctttggaacacgaagccaatcttccggtttcttagtactgcacgttgaggcttgctcatcgtacgtacgggaatatcgtcgagcagatattctccactggtcggggtgtccaggcagcctaatatattaagcagcgtggattttcccgaaccggaagtccccatgatggtaacaaactctccttcattgatattgaacgaaacgccccgcaatgcgtggacggtttcgtcgcctacctgaaagttacgtttgatattttgtatttcaattacttttttcatcgtaaataatgtgttaatgtgccaataacggattggcacattgaataattattttttcttcttacttcccggagggccaggcatgaacggacttctttctccgccactttcctgatttccttcagcagccacattttcaccgggcattgctcctatggtagcttcggtcactacttttgttccttcggaaatgccactgataatttctgtagatataccgttgctgattcctacttctaccggatgagcggtgaatgtggttccttcacgagtccagagtttatgttcgccttcgcaatcttttacgatgtcattattaccgattaacggtttttcaggtgtgaatcgcagtgctttgttcgggacagacaacacatcctttttatcaagaatatagatcgtgacattagctgtcaaacgaggtttcagtttcaaatcagggttgggagcagagattacaacttcataagtaactactgtagtggtggtgcttgtactgctcgtactgcttgcatctcccagacgaatttgtgtaactacgccttcgaatacatcattcggataagcatctaccgtgaagctggcacgctggccttctactacaccgcctatatcagcttcatccacatcggctactacctgcatctgtgtcaggtcggcagcaatggtgaacagtgtcggagtttcgaatccggaagcaacggtttgtcctgcttccacatcacggctgatgactactccgtcaatcggtgaggtgatagtagcataagccaggttacgttctgcttttgcgagcgatgccttactgctatcatagctacttttcgctttctgatagttgtagagggcctgttcgaaatccgtatcactaatcagtgacttttcgtgtaagcctttgctacgttcataattcttcttctgatattcatattcggcttttgcaccatcgtacgttgcctgttgtgatgccagttcgctttgcaatgtggcacggtccatttcggcaatcaactgtcctttggttactaccgagttgtaatctacgtaaatcttgtcgatgataccggaaacctgcgtaccgacttctacttccgtcaccggttcgatggttccggtagcagttaccgaatttgaaatatcgcctttgctcacgttggcagtggcgtaggtgactttgtgcttggccggtgaacctgcaaagaaccagattcctgcacctgctaccacaacgactgccacagcgattaagataatctttttcgttttcattcgtttattatgcttttatttagattgctaattgatctccctgatagaacttcagcaactgcatattcagtatagccatatatttggcttgaagctgttcctgctgtgcttgtagcaagttgttcttttcagtaagaagttctatggtattcttcattcccagattaaactgttcgctaattaactcatagctgatttgtgtactcttcaacttctcgtttgctgctgcataacgttgctgtgcactgttagcatccagccagagtccttcgatggtcttgtacagagttttttgttcgtcaagcaaggataacatgctcgtctcgtattgcaattttgctttctgtacggcacttttagtttgacggttattgaagatcggcacactgacagacaatccgatcgaattgttccatccgtttttcacttgctctccgaaagtgaagtcactgccgctggtgtggttggttccgattcctgcgctaaggctgattgtgggcaaataacttgatttggcaataccgatacccagttcggaagcctctacattaagtttgctagcttcaatctctgggcgaagactcaatgcacgaatgtacacatcttttttggtaggcaacggagccagtacattttcgtcggacagggcagggaggtagatgttcatttcattctccccatccagttcgagcaattgtttcagttgtaatttgtaatcttcaagagtggcttgcgctgtgacaagttggtatcggtctgtgctcacctgtgcttccagttgggcaaagtcgcttttagcaatacttccggcgttcagaagttcctgtccgcggtcacgctgcgcaatagaaacttgcagggtactttcgtttactttgacagactcggccgcataaagaatctggatatacacttgggcgatagattcctgaatgttattttcggaagtcgctacgtccagttcggctacctgattgttcaacttttcctgctggatggttttcagtcttttattaccattatatagagtccacgacgcattcagtccataattaccattgtagctcgttttactattgctactgataatttcgctgccgcttacccgactactcgtctcctgatacggacgattcaccacctgctggctggtagagaacgaaagactgggaaacaaggcagccttagctgtctttacatcaatctgcgtgctggccgcagtgatccggttcttgcgaatcgtgatgttctgctcttttgcgtagtcgatgcatgactgcaaatcccattgagccggaattttcgtttctttcagcgtatcgacttgcagcggagaaacttgggcagatatgccggacagcatacctgctccaagaaatgtcatcactgtcaatcttcttacatttatcatattcatacttctattgatttactgttagcgaaggtacgtacatattatatatgccgcaaaaacgatagacggatgacgtaatttcgccgttaaatgttttttttctgtcgataggcaggtttttgaagaaaaacacaacaaatcacacaacttttttgactagttgtttgttttaattataaaaaatgtatatttgtactcattacaaattataacgtcaacatatgaagaatacactgcttacgatctggaacttctatttggagggcttccgtagtatgaccttggggcgtaccctgtgggttatcattctgctgaaattattcgttatgttcttcatccttaaaatgttctttttccctgatttcctccgtgaccatcctacggatgacgacaagggaacatacgtgggaaacgaactgatagaacgtgccatccccggtaaatctactgatttttaactcttaaactacataggattatgattgaaagtattgacacctcgctgatcgattggtcgagagcccaatttgcgatgacagccatgtaccactggatttttgttcctctcacactcggactggcagtggtgatgggaatcatggagacgctgtattataaaacaggcaatgaattttggaaaaagactgcccagttttggatgaaactcttcggtataaactttgccattggtgtggcaaccggtttgattctggagtttgagttcggtacaaactggagcaattattcgtggtttgtaggagacatcttcggtgctccgttggctattgaaggtattttggcattctttatggaagccacatttatcgccgtcatgttctttgggtggggcaaagtaagtaaacgtttccacttggcttctacctggctcacaggcttgggagctacgatttccgcctggtggattctcgttgccaacgcatggatgcagcatccggtaggcatggaattcaatcctgatacagttcgtaatgagatggtagatttctgggcagtggctacgtcacctgtagcggtcaataaattcttccatacggtattgtccggctgggtgctgggtgctatttttgtagtcggcatcagttgttggtatctgctgaagaaacgtaatcgtgagtttgcgcttgccagcattaagattggggcgatttttggattagtagcatcgttgctttctgtttggacgggtgatggttccggttatcagattgcccagacgcaaccgatgaaactggctgccgtggaaggtctgtatgaaggcggcactaatgtaggtctggttggaataggagtgttgaacccggaaaagaagacttacaacgatgggaaagatcctttcctcttccgttttgaaatccccagcatgctttctttccttgcagaacgtaatgtagacggctacgttcctggtattacaaatatcatcgagggtggttatcaacagaaagacggatcgacagctctttctgctgccgagaagatagaacgtggaaaaacggctatcggtgcattggctgcctatcgtgcagcaaagagtgcaggacatgaggaagatgctcaaattgcatataaagtattacaggaaaatattccatatttcggttacggatatatcaaagatgtgaaccaactggttccgaatgttcctctgaacttttatgcattccgtgtaatggtaatcttgggcggatacttcatcctgttctttattgtcgttctcttctttatctataagaaagatttaagccagatgcgttggatgcactggattgctctgctgacaattcctttgggatacatcgccggacaagccggatgggtggttgccgaatgtgggcgtcaaccgtgggctatccgtgatatgctgccgacaatggctgccatctccaaactggatgtaagctctgtacaaacgactttctttatcttcctgctcctgtttacagtgatgctgattgcaggtgtcggaattatggtaaaggctattaaaaaaggaccggagaattgataattacctattactcattacttaatattttagctatatgtatatatttttgcaacaatattggtggcttgtcgtttccttgttaggggccatactcgtgttcttattgtttgtacaaggaggtaattctttgttgttctgcttgggtaaaaccgaggaacatcgtaagatgatggtgaattctaccggacgtaagtgggagtttacgtttactacattggttacatttggaggagctttcttcgcttctttccccttgttttacagtaccagtttcggcggtgcatattggctttggatgattatacttttcagttttgtattgcaggctgtcagttatgagtttcagagtaaagccggaaatctgttaggtaaaaagacataccggacttttttggtgattaatggagtggtaggtcctgtgttacttggtggggcagtggctactttctttaccggttctgatttctatattaataaggccaatatgacagataccattatgccggtaatcagtcattggggaaatggctggcacggattggatgcactgaccaacatttggaatgttattcttggattggctgtcttcttccttgcccgtgtgttgggatctctctatttcattaataatattgatgataaagagctgaccgataaatgtcgtcgtgcagtacgaaataatacagttttgttccttgtattctttttggcatttgtcattcgtacattggtatctgatggctttgccgttaatccggatacacaggaaatttatatgcagccatataagtatctcactaactttatcgaaatgccggtagtgttggctttattcctgattggtgtggtactggttcttttcggcattggaaagacattgcttaaaaagacgtttgataaaggaatctggtttacgggaatcggtacggtactgactgttttatctttattgctggtagcagggtacaacaataccgcttattatccgtcatatacagacctgcaaagctcattaactttagccaatagctgttccagcgaatttacactaaagacaatggcctatgtctctattcttgttccattcgtaattgcatatattttctatgcttggcgtagtatcgatcgtcacaaaattaccgagaaagaaatggatgaaggaggacactcatattaattgtccacatagaatttcgaattgagattcttgtaggaacaaataaactccccttatttaattctttatgtcatggtagagaagttaaatgaggggagtttttatatataagccttttctatcctttcggatatatcgctttttatttattgactatattctccggttttccggcaatgtaagcctgaaggttactgattgcaatattcatcagacgttcacgagcctcgatggttgcccaggcaatgtgcggagtgatgtagcagttcttcgcagttagtaatggattgtcggcacaaggcggttcagtagaaagcacgtctactccggctgcataaatcttgccattgttcaaagcgtctgcaaggtctcgttcgttgataagcgggccgcgaccggtgttgattaaaatagctgtcggcttcatcatacccaaacggcgtgcatttaccatttcgcgtgtctccggagtaagcgggcagtgcaaactgataatatcacattcgctgaacaactgatctaaatccatcttcttgatttccggtggcaactggaagtgagatttggaagtcaatgcatacacttgcataccgaaaccgatagcaacgcgcgctgtggtatatccggtatttcccagtcctaccagaccgattttcttttcccgtagttccatcaatggagtatcccaaaaacagaaatccttgttattagcccaacgacctttatgcacttcttcagagtggtgttgcacttgttgagtgatgttcaggatatgcgcaaataccatttgagcaacggaagcggtgctgtatgaaggaatattagtaacgacgattccccgttcttttgcagcagctgtgtctaccacattgtatccggtagccaacacaccgatatatttcagttcgggcagtgcagccatgtggtctgcattgatgattaccttgttagtcagaattgcttctgcaccggctgcacgttctaatacctcttccggagctgtacgatcataaattgtacattctccaagcaccttcataccttcccaggataaatctccgggattggcggcatagccgtctaaaactacaatcttcatttcaatttcaatattattaatatgttataatgtttcctactgctttattgtgcttttagcttctcttacagaagggagtgacttattttacgaacacttatttcttaaatttgtctccccacaactgtatcattcgctcggcatgtttctgttctgccggattgttttgcggttgccatattcgtttgtctttcagctcgtccggaagaaattgctgtttgacaaagttaccttcatagctgtgtgcatatttatattcctgtccgtagcccagttgcttcatcagtttagtcggagcattgcgcagatgtaaggggacgggcagattgccggttgaacggactagctccagtgcatcgttaatcgcactgtatgccgaattactttttggactggtagccagataaatcgttgtttcagccaaaggaatccgtccttcgggccaaccgattttcatcaatgtatcaaagcacgcattagcgagaagcaatgcattcgggtttgccagaccaatatcctcggcagccgagatcaccagtcggcgggcaatgaaagccggatcttcgcctccttccaccatacgggcaagccagtagatcgctccgtcaggatcgctaccgcggatagacttgatgaaagccgagataatgtcataatgcatctctccatccttgtcataagccagtggattctgttgcaagcgttcggtcaccatttcatcggtgatgacaactgtttcctccgtctccgattgcacaacaagttccaatatattaagcagcttgcgggcatctccaccggagaagcgcaacatagctgttgtttctttcaattcaatttttcgttccttcagtatggcatctgtggtgatggcacgttgcagaagttccagcaaatcttctttttccaaagatttgagtacataaagctggcaacgggataggagagggcggatgacctcaaacgacggattctccgttgttgcgccaatcagcgtgactgttccgttctctaccgctcccaacagagagtcctgctgcgacttgctgaaccgatggatttcatcgataaacaaaatcgggctggactgcgaaaagaaacggttgctcttggcacggtctatcacttcgcgcacatccttcacacccgaagttacagcgctcaaagtatagaaaggcgtttccagtttgttggcaatgatctgtgcaagagttgttttacctactccgggaggtccccagagaataaaagaagagatgcgtcctgcgtcaatcatcttccgcaagatggctcccggtccaactaagtgtttctgaccgatatattcatccaaagtttttggccgtaaccgttctgctaaaggttgcataattttttagaataccattaataccatgaaacgaataccgtttttgttgatacccggattatcacgataagtgaaacgatgtacatattcaacatgcagcaacttgaaaatgttgtagatacctacacttccttcaatataaggcactttcgggtccatcacgaaactggtgaacttaccgtcgcgtgtcgggaaacggaacaaatcgggattgttgctcttaaacggattattcttatccgtcaatgttccccacaaagcacgtacgcggaacatttccctccatttcaagttcttgataagaggaatacggttgaatagttttccattcatatcataagataatgacatggaagcgtaacggtcgttcaggaattccatgttattaatcaagttgaacgtttcgcgctgggtgatgtaggacaagttagcttccggcaagatcaacaacgggaaaggaaccgtgttccattctgcgcctgctttcacgctacaatcaatctttccccaggaagcggggagccagaaacgtttccatacacttgcttccgtacggttaaaactataatctccacctagtactcctttgaaacccatggcatgagtcagggtaaagataggagcatccagcgatacaggtacgcggcgttgtttggagttgacaaatgattcgcccggagcataacgtagtgtcagacttgcttccgaagtcgtgacatcatgcacacgggtttgcgcggcatcattgcgcagatattccagtttgccggtaggctcgtcgttacgatggcgcagcatggctttcactccgaatcctgtcagcgtttcaagttcataattaatggtggcatcgcgcatatacgacatctggtctactgtcgttgtttttaccgacaggaagatattgtctttatctgtgaacaggaatttatccatcggagacattacgtcataactgtacgaagccgaaagataatgtttcgggaattcccagacaacataatcgcgtttattgaacgaataagtcaccgtaccgctatatttccagcgttcgtctttcagaccgtaagctccgtatccgttcaagaaccagtgtttatggaaatgagctgttgtcatgccgcttaaccggaaacgggtaccatcaatgtagttgctcgaaatcatggtgttgataggaccgatatccactttgctcggatggcctttgcttcctgtttccacaaagttttcgatcagcgctttcgctccgaagatgatgtatttgaatcccggtatctgttcgaggcggttaacgaatacatccatcgaactttctttcttcgtcagcggtacttgacgaacactcgcccaatactcatcgcttttcgaaagcatatccgcttcttttatcacgctgcctttcaatcggaacagtcgttgttcgataggatcgaatttataattactatatttcgtagttcgttccacctgcaatccgcctgctgttttgttggaattccaggacaggtctacggtcatgtcatcatccgccaatacccagtttccgttagggagttgctcgtattgttgcacgatgtccatacggttgacgaagtttactccggtctttttaggcaggttcatcgtacatttctgaacggcataagtagaatcgttcaatacatacagatgtccagtgaatccgaagtcctgcgagttttgcggaacaaaagtaaggtggacacattcgcgcttgtttaccatcaatgtgtccatcagataatatttataaaatgagatggcattgttaccgatcggactgacgaaacgctgctggagcaatcggatatcgtcgtcgtagatattgatgtcggcaaatacgtctttcaatacagtgccgagcatatctcccgtagagaaaaattcttctataccattggaattctttcctttgataatcgttttcttgttttcgggatttttgcggtagatggtttgcgaggacgtttcctgtacggaaatagggagaatcaacttattggttgtttccgacacttccacctgatctcttaagaatgaatatttcttgtagatacctttttcgagcttttccggtgtgaggtcgttgatggacattttcatcttctcgtacttgtcgtactgatagtactcgttcacttcgagtacttgcgcttttttgtgttcgattaccttcttcatgaactccactgccggattgttcttgcgggaatatttctccttttgaggcttcacgatcacttcgttcaggagcacattgtccggagctaacttaacgttcactgtctgattgttggaaccgactcgaaccgttttactgatataacctacagcggagaacaccagtgtccctccgtttctgcgggcttcaagactgtattctccgtcaatattggtgatagtacccatatctctcttttcttggtagtaaacagagatatacatcaatggctcgtgggtaaccgaatcagtgactacccctttaatttgctgcgcaaaagcattggaagctaccaatacgagtaagaacagtataagtattttgttatatcgttgtatcataacgtttgtagtagggctgcaaagttaacaaataactctaaggataacagaatatataactttttttacccatcgtttttggttgtttacaagcatatatcgcccggtaatccaaggaatattcctttgttaatccttttgataaggctgtttcagcactttgttttcccggtcccgatatttgaaacctttgctctcgttgtagggcactttttgtttcgacacttgacactttttgtttcccggcatgaaactgttggtttctcggtgtgaaacactttgtttcccggtgtgaaactattagtttcaaggcgtgaaactaacagtcccatgccgggaaacggaatggaacatgccgggtaaatgttatttgctcgtaagtatctgtacaatacgctctgcggtacgtccgtcccaacgttcgggaagttcgccacgtttccattcaccatgcatcagtgtatccatggttttggcaagcagggcaggatcttctccgacaagttcgttggttcccatgcgccacgtttccggatgttcggcatacgtgttgagtgtgatacaaggaatacccaggaaggtcgcttcttcggctacgtttcctgaatctgttatgattccttttgccttgtttatcagataaccgaagaacaggtaattctgcggaggcattatgtggaggttcggagcttcgatgcctaattctttgatggcatttcgtacgtatgtgtgcagcggtgctacgataggcataccggcagatttttcaatgattgttttcagcaactgacgcagattctctttgttgtttagcaatacgcgacggttgagggtgagcaaaagataatttccttcttgcagtcccaagacagagaaccatatcggtttgagcaagcggttccggttgtagcggatggcatcaatcagaatgttgcctacataatatacgttttcactttccgttcctgtctggttcaggttgcggttggcaaccatgccggcagtaaacagatagtcggatagtccgtctgtaatcatgcggttgacttcttttggcattttcatatcgaaagaacgggttccggctacgagatgtgctaccttgataccttgtttcttggcaacgatggcacaactcatggttgcggtcaggtcgtctaccacaaggactacgtgtgccggattctccgtcagctcctgttcgaaggctaccatgattccggctgtcaaactcgttggattactgctttccactcccagatacacatcgggagctttcatatcgagatccgaaaagagagaagcatccagacttgtatcgtctttccttcctgtatataccagtcggtaagagatacttttacccagcgcccgtgcggcttcaatagcgcgtgtaatgggagctatcttcataaaattggggcgtgcccccgcaacaattgttattttcatattgtttctatcttattcggtttaattcgtgaagcaaaagtacattttcttacggaatttattcgttactttgcatacaaaataacaaatatatgcccacattcgttcaaattcttgattttataggcacatttgcctttgctataagtggcatccggctagcttcggcgaaacgtttcgactggttcggcgcttatgtggtaggacttgctacggctatcggcggcggtaccatccgtgatgtactgctcgacgtgacaccgggatggatgactgaccctatctatctgatttgtactgggctggctttgttgtgggtaatctgtttcggacgctggctcatccggctcaataatactttcttcattttcgataccattggcctggcactgtttaccgtggtaggtgtaggcaagagtattgctttgggttatcctttctgggtggcgattatcatgggtagcattacgggagcggccggtggagtgattcgtgacgtatttatcaatgaaatacctcttatcttccgaaaagaaatttatgcaatggcctgcgttgtaggcggtattgcatactggctgtgcgacgttgcaggtctggaatcatacgcctgtcagttgattggcggactggcggtattcctgacccgcatcttagctgtcaaatatcacatttgcctacctatattaaaaggtagtgaagagccagaagaataaggatggcattatttttcctcctttatatccagttctccttgaaaactaatggactgacggttttgcatattgacatcgatacttgccgaaccattgggaaatactttggctctgaattcatatctgtcttcaggattacgtgcgacgaacttgataacggcattcccttttttatccatttccacattatattctttgaggatggttttgaagttaagtccgtcacctccgccatacggaatgctataagcccgtccataataaggcaagtaagaaataaccgaatcatttctgattgtcagtgagtaggaagatgtcaaagggatggagcgtccgcgcatcggcatggcagtgttgacatctatcttgtaattttcagattcaattagtttcattactgcttctttcttctgttccttcttttcctttttactttgttgagccgaaagggtagggatgcccactagcaaggctagtaacagcataaagatttgcttcttcgttctcatatcagtttgcatttaggttgatgtatatatgtataacaatcaaatatactaaaaagacagggatacttctgtttcttttaatgaaaattaaacagaaccccctgttatttatgagtttagcccaatttagaactgttccagtatttcgattcgtttttcgatgggaggatgagtggcaaacaatccgctaagtccgctgaatatacttttagatgccttttgggggttctgaataaataattgtgccacgtctttcctttctactgcttcgatagcgggatctgctgatattttgcggagagcgttggccagtgccaacggattcttcgtcatttctgccgaacctgcatctgccatatattcgcgtttgcgtgagatggcaaaacgcatcaggcttgcaaaaagataaccgatggcggctatcactaaagcaataagaataaaaagaaccacaccgccgctacctttactattactacgcacgcgtatgtgtgtaatggcataaaacgtgatttctgtcagcatggagaagataccgacaaagacaatggaaataatcagcaggcgtacatcgcggttgcggatgtgacttagctcgtgcgcgatgactgcttccagttcctcatcatttagtttccggatgatgccctccgagagagtaacggtgtatgtgcgttcgttgataccgctggcaaatgcattcagggaactgtcatagatgatattgattttcggcattttcatgccttgagacatacagaggttttccactagattataaactcgtttattctcctgacggttcagcggcttggagccggtggcggaattgataatgcttgtgttagcccaataggcaatcagaaaccagattaatacaatccccatggtatatggtaacgaagagaagaagaaatgattgactattggcatcatttcgacttccatatcctctttatatcccataaaagtcagcaggtagcaggccaaatagaggagtgctgccacgagacagggaaacaggaatagtagaaacgcagagcgcagattattccggctctgctgtgtttggattccgacgtattgcatgcgtgttcgacttttgtaattggatggacggtgtatataaaggttttagaaactaattttgggtgcctgctccaaattcgcacgttcgtttttccccaagtcgaacattatctctctttggaatccggtcattcctgctacgatattcgacgggaatgtctgcacggcgttattgtattctttagtggccgagttgaagtagcggcgaacagcagccagtttattctctacgtcagaaatttcttcctgtaattgcaggaaattctgattagctttcagatcgggataagcctcgagagtaatcttcaatccagcaagagcagagcttaactggttttcggcagctatcttatcatcaatcgtttttgcgccgattgcaccgttacgtgcctgaatcacccggtcgagcgtttccttttcgtgtgcggcatatcctttcacggtgtctaccagttggggaatgagatcatggcgttgtttcaactgtacatcgatgtcggcaaacgcgttttcacgattgtttctcaatttcactaatgagttgtacatggaagcaaaaatgatgcccagcaatacaataatccctacaataataagtatggtcatagctttttgttttatttaataatataaaatcaaaagtaatctatttggttcttttaaccaagtagtagggggtaaatttcgcaaataccacctaaaaactatcagaaagcacctaaaatctgtcatttgatagaattaacccccaagaaatgacaaattttcccctgcttgataagcaaaatacctttaaacttgcaaacatcgagaaaaacgaaatattaaccataaaaccattaaagtatgaaaagtttaagtttcagaaaagatttaattggagtacaggaagagttgcttcgttttgcttataaattaacggccaaccgtgaagaagcaaatgatttattgcaggaaacatctttaaaagcattagacaatgaggagaaatatgttccggacacaaatttcaaaggatggatgtacactatcatgcgcaacatctttataaataactaccgtaaaatagtacgcgatcagacctttgttgataccaccgataattattatcacttaaatctgccacaagattcaggatttgaaagtaccgaaggtgcttacgacctgaaagagatgcatcgcatcgtcaacgcactcccccgggagtataagattcctttctccatgcacgtatcaggtttcaaataccgtgagattgcagagaaattaggattgccattaggtacagtgaagagccgcatattcttcacacgtcaacgtttacaacaagagttgaaagattttgtataaatgaggataacgcatacaaacaagcttataagcaaaaggagcaaggggatagatcctcgttgctcctttctttttatttatgattcaattatcacttgcctttcttgtttttgctttttttcttttctacggctttttcttcagatggaaatttaggaaccagattcatcagccgtaatatctgattttgtcgttttaatatgtatgacgaaggtttcgccgagttaaaccgtatcggattgggcagagtagcggcgataagtgcgcattgtccccgggtcaactgggcagctgttgttccgaatttgacctttgcggtagcttgcgcgccgtagatgccatttcccatttctatagagttgagatagacttccatgattcgttctttcgaccagaacagttcgatgagaaacgtaaagtagacttcgagtcccttgcgtacccacgaagattgcggccataagaacacattcttggctgtctgctgactaatggtacttgctccgcgtttccgtttgcgtgtttcgttctctttcatcgctttcttgatttctacaagatcgaatccgttgtgttcggcaaaacggttgtcttcggaggctatgaccgccatcggcaggttgggagatatcttatcaaaagaaacccacgtgtgcttccacgtgggtttatctcctgaaaaaatctgctgaacgcttcggataaccatcaacggagtgacataaaccggcataaaccgatacacaatcactgccaacagagtggatgcaaagaagaaaatcagcaggttgcgcgtatagcgcagaatttttttaattagcagctgcttgtgcatctttaatcatttgttcacttgcgtacatgtatacttctacacgacggttttgttcgcgaccggcagcagtgtcattgcttgcaacgggatcgctttcacccattccctgtacacctttgatctgattggtggaaacaccacaactcaacaaataactagacacgctctgtgcacgttcttgtgacaagttcagatttttctgctggctttgtgcggcagtgctgtttttccagccctggttgtcagtgtatccgtagatagacacgtccatatcccggttctgattgagcacattgttggcaaacttgcttaaagcagatttagcagcagcacttagatttgcattaccggtagtgaaaagaatacccgagtcgaatgttactttcacggcttgcaatccgttgttgtctgttatctgttctacttgtgcgccttcaatttgttttgcttctgctgctgctttgtccatcttcttaccgataagagcacccgtacctgcacctactgccgtaccgatagcagcaccaatagcggcacctttacctttaccgataacacctcccaggattgcacccagtgcagcacccgaaccaccaccgatagcagcacctttaccagtgttgttcatacttccacagctaccaaatatcatggcaatactcatgaagagaaccataaatttcatcttgttcataatgttgatgttttttttaattggtttataaataatgtttttatacgaatcgcttcgtattataaataacaatgcaaagatacatattatttggcaagcatgtactttttaagttaaaataactcggatgaatccctttgtttgttaataaaggaaaacgaacattatccttttatcgttgaaggaatacttaagcacttctttttgataataatgaaccaactcaaaagaattaaacctttggcaacggtggtgacgcagactgcccaccagattccttccactcccatacccatccgtacaaacaggatagcaagcggaatacgcatatagttgcaactgatgctgataatggcagggggtattgtgcggccgatgccgtagaaaactccctgcatggtgatttcgagcatcataaagagctgggaatatccgtcgatacgaaggaatacacctccggcttcataagcagcctgttcgggcacgaatatggcgaaaacttcgtttccgaagaaaacgaatagcaaggtacagagtgtgccaaagattcccgtcatccatagggtagtgtaccaggatttaagtacccgttcgattcgtccggcagcatagttttgggcgatgaaggcacttagtgcggtggagaatccctgtgaggtgttccaagtaattgcttcgatttgtcccccggtggtgaacgtcattaagccgatgtgccctccctgttcggaagcggtgcggcagaggaacatgttgacgaaggcaaacaatgtatttaaagtcgctacgggtaatcccagtttaaggattctccgcgtgtactttttctttagccgggtgaagaaagggaaaccgcccagcagcgcatccctgcaacgcaactgatagacgaaaatcaggaaaacacttgcttctgcaatccaggtggcgtacgccgcaccgtttgttcccagtccgaaaccgaatataaagagtgggtccagaacgatattcaatatcaaccctgtgccactgataaagaacgggactttgctgcgtcctgctgcattataaattccggtgaaggcagcggaaaggaaaacgaaaggtaatccggtagaaacaatccgcagatattgaatggcattggctgtgatatgttcctcaagttcataaatacgtatgataggttctgcaaatataaaaaggagtccgccccagcaaatggaaataatcaaagcaatcgtaatattatgagacgcgaagctgcgggcatcttcctggctttgcgcaccgatggattgtccgacactcacttcagatcctaccttatttaataaggagatagaaccggacatccacgtcaggattccgacagaaccgatagcggctacggcttcacttcccaaccgtcctacccatgccatgtctgtgagactatatgccatttgaataaacgacgttgccatgatcggcattgccagattaaacagttgacgattgataggaccttgtgtcagattctttattccttgcatataatttttctaatcgaaatggggtgcaaagatacgtaaaattactatcttcgcacatctaattattcattaatcaaagtacatagatactatgaaacagaaattttctactatttttctcctgttgcttctcttgctagcaggttcacgggtggtagcacagaatgctccgaagccttttgatatcgaacaaccttcacttcgcgtattccttcctgcgccggaattggcaacggggcgtgctgtggttgcttgtccgggtggcggatattcgcatttggctttcgaacatgaaggttgcgactgggcaccctatttcaataaacaaggtattgcattgattgtgctgaaataccgtatgccgaagggggatcgtacattgcccatttcagatgctgaagcggcaatgaaagttgtgcgtgacagtgctgatgtttggaatctgaacccgaatgatataggcatcatgggctcatctgccggtggacatctggcatctaccattgccactcacgccaaacccgaacttcgtccgaatttccagattctgttctatcctgtgattacgatggataaatcatatacccacatggggtctcacgacaatcttttgggaaaaaatgcttctgctgaattggaaacggaatattccaatgaaaagcaagtaacgaaagatacgccacgtgctttcattgtatatagcgacgacgataagaccgttccgcccgctaacggggttaattattatttggctctaaacaagaataatgtgccttcggtacttcatatttatccttccggtggacatggatggggaattcgcgagggtttcctctacaagagtgaaatgctgaatgagctgacatcctggcttcgtagttttaaagtgcctcacaaagatgccatccgtgtagcttgtatcggcaatagtataacgtatggagcacgtatcaagaatcgcgatcgtgatagctatcctgctgtgttaagtcgtatgctgggagaggcttattgggtaaagaattttggagtaagtgcccgcactctgttgaataagggcgataatccttatatgaacgaaaaggcttatcaggatgcgctggctttcaatcccaatatcgttgtcatcaaactgggtacgaatgacagtaaatcgttcaactggaagtataaagccgacttcacgaaagatcttcaaacaatggttgatgctttcaaagcattgccttcccaaccgaaaatttatctttgttatccttccaaagcctatcagaccggagataatatcaatgacgatataatctctaaagaaattattccgatgataaagaaagttgctaagaaaaacaacctgtccgtcatcgatcttcatacggcaatggacggaatgcccgaactattcccggataagattcatccgaatgaagcaggtgccaaagtgatggcaaaagctgtttatcagtccctgaaaaagtaaaatggaaacacaataaatgcagaatttccggttggaacaatctctttatgagaaagtttcaaccggaatttttttagtttaacgacgaataaacttcttataatatgctaaaaatataactttctgaaagtctggtttatgggtaatccgtatttttgcgcccgaaaaataataaaatgataaatagcgttatgaatagactacaagattttacctttttctcgcagttgatggctaacgctaatatgggatggtggaaagccaatttatcaactgcgaattatgaatgttctgactttatagtagagttattaggtctggatcagaccggaattattagttttgaagatttcaataaacgtattctgaaggaggagcaacgtcctacgactgtccattcttttggcgtgcatcaaagaccggaagcggtatatttacttgatacggtgaaaggacctgtttgggtacgtagcaaggtatgttttcaagaaacggatgaaaacggaaacgaaatcatttatggtatatccgaagtgcaagatggtcctgatatggcatctgcttatcaagctttgcaatacagtgagcgtctcttatctaacattttcaagtatttgcctattggtatcgaattatacgatatggatggggtattggtggatttgaacgataaggaattggagatgtttcatatagagaagaaggaagatgtattgggtatcaatatttttgagaaccctatttttccgaaagaaatgaaagaacggctgaagaaaaatgaagatgccgactttactttccgttatgacttctcgaaggttggttcgtattatcagaatacccagaaacagggcacaattgatttagtgactaaagtgactacattatatgatagcgaacaccaaccgataaactatctgttgattaatgcggataagacagaaacaacggtagcctataataagattcaggagtttgaggagttttttgaactggtcggtgattatgccaaggtcggttatgcccacttcaatgttttgagtggacacggctatgcccaaaaaagctggtacagaaatgtgggtgaagcggatgaaactccgttgtccgacatctttggcacataccagcatttccaccccgatgaccgtgccttgttgattcggtttttggacgacgcacgaaaggggcttactaccaaacttagcaaagagatgcgtgtccttagggaggatggtacatacacatggacgcatgtcaatctgttagtaaagaaatatgccccgcaagaccggattatcgaaattatcagcatcaattatgatatcacagaactgaaaaggacagaagaaatgcttgtcaaggcacgtgataaagctgaagcatccgatcggttaaagtctgctttcctggctaatatgagtcacgaaatccgtactcctttaaatgctattgtcggcttttcaagcctgttgactagtacggaaaatgcagcggaaaaggaactatataattctctgattggacataacaacaaactattattaaatctgattaatgatgtaattgatctttctaaaatagaatccggttatctggaattgcgtccggactgggttaatctttccgagcttcttgacgagagtgtagcggagtatgctcatcaagtaccatccggcgttgaacttctgactaactatccggcacatgattctctggtagaactggatagcctgcgtatcaaacagatcttgagtaattttctttcgaatgccttaaagaacactaccaccggacatgtggaagtcttctatgaggtagaccaccaatctgtcagaatcggtgttaaagataccggtcggggcatcccgcagaatatgcttgaaaagatattcgaaaggtttgagaagttggattcctttgctcaaggggccggtttgggtttatctatctgcaaactaatcgttgagaagatgaacgggcgggtattagttgattcccaactggggatcggtactacttttgtaatcgaactgccgtgtcgttctatgcttgttgagtaagtatatgtgaagaatcttaaaagaaaaatcccttgataacgactgattatcaagggattaattttgtttttgtgatccgcctggggttttcaccgtagcggtctatatctttgatttataagctcttgtaaaccttgaaaaattgtaccgtaacgaattagtaacgatttataggaacgcttgttgtcagtgagaggcattcgtttgtcagctgttctctgatgccgcaaagatagagcattactttttattttccaaacatttgattattaaatctttaaaaaagatccccagtgcaaggggcgaacctatatatatggataggtttgccccttgcaccgggcggatgctgcatcagtcctacagccttgccgtccgcctcgataccgccgtttatgtgaagcggttcccctccttttgcgctgaaccgaaaaaatcatggtgtagtacacgtatagtatcccatgcgctgccttttattgttattcttttgcagcaaacattgaaaattaagtttgttatggaagttattacatttgaaagcgaagcgtataaagcgcttgtagggaagatagaaaaaattgcagagtatgtagccgcagcgcagttgccttcggaagaaaaaaaggaggcttggctggacagcaatcaactggcggaagcgttaggcatcagtacacgcacattgcaacgcctgagggatgaaaacctgatcagctactccatgctgcgtggacggtgtatgtacaagctgtcggaagtcgaacgctgtctggaagagcgtaccattcggtgcaaacctcaaacattggaggattttcgcaagaactacctaacgagaatcggcaatgataagaaaggatgatatactgaaaatgacggaaaagggcatttccgtattccgctattacctgccggtggacttcaaggtgggaaagaacttcctgaaccctttttataaggatacgaaggcttcgtgcaatatttattacgaacgtaaggccggtgtgtttaaaatgaaggatttcgggaacgaggattattcgggggactgctttgagctggtgggcaggctgaacggccttaactgcaaggagcctaaagagtttgtcgagatcatggaaataataaaccgtgacctacatttggggctgtccgcacatgaggaatatcatgtgagccatagcaaagtaccccaaaagaatgaagtggtatcggaagagccgaaagcgaaaagtgtccggccttatactgtcgtgcaaaagccctttacggctacggaacttgctttctggggtaaatcgggtatcggggagaatattctgaaagcgtaccggacggtatcgctaaagaagttcagcagtgagaaccaggaaagaaagcctttttcctgtatgacaagcgtcgatgaaccgatgttcggatatatgggtaaacagcatatcaaggtttaccgtccatgttcacaaatgcggttcctgtacgtcggtgattttggcgacaactactgtttcgggctggaacaactgccggcaaaaggtgatctgctctttatcacaggcggagaaaaggacgtgatgagcctggcggcacacggcttccatgcgatctgtttcaattcggaaacggcttttatccctgcggctgtcatacaccggctttcgttccggttcaaacatatcatcctcctctatgatgtggacagtaccgggctgaaaagctcggcgaagcgtgaagaggaactgaaagaatacggggttaaacggttgttgctcccgcttgctggtacaaagacggagaaggatgtctcggactactttatgcagggaaacagccgtgaggatttgataaaactttttctggactatctggaaaccttatacagtgaaaccatgtcggcattgaaatcctgcgaggtggatttcaacaacccgcctcccattgcacagatgatcgtatcggtaaatgacgtgcctctcggaactcaaggcaacctgctttgtgtcaccggcggagaaggcacgggaaaaagtaactatgtggctgcgttgattgccggtgctatccgtccctccggaacggatgtggatgcgctgggcgttacgcttcacgaaaatagcaagaacaaggcggtcctgttctatgacacggaacagagcgaagtgcagctttataagaatatcagcaacctactgcggcgctgcggacgtgaggcgatgccggaatggttcaaggcgtattgccttacgggaatgagccggaaagaacgcctgctttccattatccagagcttggacaagtaccattatcaatacggcggtgttcatctggtggtgatagacgggattgcggatttgataaaatgcgccaacgatgaagcggagagcatagccgtcgtggaagaactgtaccggctggccggtatctataaaacgtgtatcgttacggtactgcatttcatccccaacgggctgaagctgaggggacacttgggaagcgagttgcagcggaaggctgcggcaatcctttccatagagaaggacagcgatccggctgtatcggtggtgaaggctctgaaagtaagggatggaagtccgctggacgtgcctatcatgcagttttcgtgggataaggaaaaggccatacacgtctatctgggcgaaaagccgaaagaggaaaaggacaagcgcaaagaggacgagcttgtagcggtggcaaaagaggtattcagccggaagcggttcgttacttacgtggagcttgcggaagaaatccagtcgatactggaggtgaaggagcgcacggcgaaaagctacatcaggttcatgcgtgagaaagaaatcattctgaaatcatccgataaccagagctattatgttatcgggaacttttaaggagggaagcgtatgttagtagataaaacggaatttgaagcatggatggaacgtatcatgggtgagctgtaccgcatctcccggaaactggacaaggcggaaacgagggaaaagcacctgaactacctggacggagagcgtctgtatgacaatcaggaagtatgcctgttgctgcgcatcagcaaacgcactctgcaacgataccggaataacggggtgctgaagttctattcgatatatcacaagacgtattacaaggagtcggacttgcacgagttcatccgcaacaacttcgacgagaacgagataaaacggcaggcacgtgaggacaagctgtccgagagctatccgctgccgaaagaataagtccatgtttttgctttgtaccggtgaaactactgccgtgaggcaggaaatcccaaactgcgtattggtgtttgtcatggcaatgacttcatacagttgtgaaacaggatgaagtttcttttcttgttcgaatggtgatactccaaaggacagcggtccggaggggtatctttttttatgtatttgtctaaaaataggctgattagttttttataatgaaagaaaaatggtatctttgcaatgtaatattaatcatataaatgctatggctcgaccaattaaagagactccggtcgtaaccggtaaggatgcaaaacgctttgcggaaaaaatggcaaatctcaaacctgaaagcaaggaagagaaagaagccgcaaagaaagtttatgagaagttcaaagccattgcttcattcgcattgtaacaatggctattgaaaattatgattttgtaccgttaaaggtagatactaacataaaaccgtttaagtgcacagacaatgacttaaacggttttttatttgatgactctcaaaaatatctggcagacttgatggctgtcacctatctgcttgaagatttgtcatgcggaaaaactgtcgcttattttagcttgttgaatgataagataacttttgatcctgaccaacgttctatatggaacagattgagcagacgtgttgccaatgctaaacgcagaaaacattatcctgctgttaaaatcggaagattggctatatcagaagaatatgcaggacagggactgggaagggatattattcgtcttatcaagtttatgttcactcacggaaaccgtaccggatgtcgtttcattacggtggatgcctaccatgatgcggttggattctatttgaagtgtggatttgattttatttcggagaaagatcagaatgaaatgacacgctccatgtattatgatttaaagcgttttttgggatgaatagcttattcgtagaacaaaactatgagaaggtttataattaaaaattgttttgtgatataaaaacgataatcatatggcatatctaataacttcttaatatatttgttgaatcatatttcctaaactctaataaaaacagctatgtataaagaattgattaatggtgcatttgtaccgcaagatatatcttatccaacactaatgaagaagcatgtaaaaaaacattcttcatatcttcaaccaatatttgaggcgattagcaattctttagaagcaacatcaggtaaagatgacattattaccattagaatcaacaaggcaaaaacattgaatcaagaacaatacagttttttgtctattgatattattgatacaggaattggatttaatgatgataactttggacgtctaagaagattatatgatgaatctaaagggcaaaataattttggaacaggacgtgttcaatatttacatttctttaataatacagatatatatagtgtctttgaagaagaaggcttgaaatataaaagaagaattgtattgtctaaaaatttctatgcaacacagaagtcggttatatggtcaagtgaaaaagaagtagtagatatagatacgccaataggaacaatggtttccttttattatcccctaagtgatgaagataaagaaaaatataatgaactaacgacaacagagttaagagatagaatattgattcattacttaagtcgtttttgtctaaatagggataatcttcagcaaataaagttagaatattatattaatagtatttgtgataaggatagcgttcaggtaataacaggaaaagatattccacagccagattataccgattctgtacaagtgaattattctaaaatatcagtagatggaaatactattataaaaacacccaatacggaagaattcataattaattcgtatagtttaccttgttctatacaaaaaagaaatgaggtaaaactgacaagcaagaatgaaacagttgaagtgtcaggtattgatttttcaataataaaagattctcctaaaataaataatagctatttattatttttgatttcaagttcctatctaactcaacaagatagtgatctgagaggacagttagctatttattcaaaaaaagattttctgaaaaaaagaaatcttttctctggcgaagaacagattttaaccgatgatattgaggaaaaagttacttcctctataacaacacattataaatctataagtaaggttaaggagtcgtttgaatcccagatagatgaacttgcagaaatgttttcgttagatagaaggattttaaatgaagtaggatataaagcaggggattcagatcaaagtattttaaagaaagtgtatgaatacaatgcagatatatcagcgaaacatgatgctggtataaaatcagtcatggattcattaaaggaacttactccaagttcaaaagactttaagaagaaacttaatgaaaaagtaaagaaagttactgaattggttccacaaattaatagaacggagctggtgcgttatatttcgaaaagaaaagtaatattagatttaatgcagaaaacgttagataagcaattagattgtcaacaaaagaattctaaaggaaaaaagattaatcatgaaagtttcttgcacaatatattgtttagccaacattctgatgatccattggatagtaacttatggatgataaatgatgattttatacactataaaggaatttccgaatctgaactgagaaatataaaggtagaaaatgagcttttttttagagaagatttaactaaagaagagcttgaagaacttacagcctataatagagataaattagggaatcgtccagatatacttttatttcccaaagaacataaatgtattatcattgaactaaaaagtatggatgcggatgtatctaaatttgtatcacaagtttctcaatatgcaggcttaatcaggcaatacgcaaaagatagatttgagataacgacattttatgcttatttgataggagaaagtttcacccttaatgaagttaaacgagcaaatccattttttaaaaaagcttattactttgattatttattttgccccaattatccagtagatggaggagagaatagaagagatggagaaatgtatattgaagtaataaaatattcgacgatattggaacgagctgttttaagaaataaaatatttacaaataaaatttagttcttcaaattaagtaatcccactccttcagttgtctattagagttactggagtgggattattttatagacatctaaaatattccagttttgtggcataaaaactggaatacgtgccgagaaactaatttagtataattagtataataaggtgtagtatatgagttgaaatgttaagtattcactcttttggggttttctgtgctttaatcgtattatatctcgaaattattactaactttgtcattggctgcaaattttacggctgtaaagtttacggcagtaaactctgtaatggtgaaatcgaatataaaaagataaggatatgaaattttacaatagagacaaagagttagcattgttggaaaaggttcgccgagtgtctttttctgtacattcccaaatgaccgtacttaccggtcggcgacgtatcggcaagaccagccttatattcaagagctgcgaggatactcctacggtgtacttgtttgtcagccgaagtaatgaaacggatctctgtttacgatttacttccgagatccggcaggcacttgatatttatataccggaacttaccaactttgcagaaatgttccgcttcttaatggatttgggaacacggatggaatataatctggttatagacgaatttcaggagttctattacataaatcaagagatttacagtttgatgcaggatacttgggatcgactgaggaaacagagccatgtcaatcttatcgtgagcggttcggtctatacccttatgaataaaatcttcagggattcaaaagaaccgctgtatggtcgtgctgacagtatcatgaagttagctccttttactacttccgtattgaaagaaatcatatcggatcataaggccgactatactaaagatgacttgttggcactctatacctttaccggtggtgttccaaagtatatcgagcaatttatggacaatggatgtacaagcatggaaagtatggtcgatttcatgttgcaacccgattcatcctttctgactgaaggacaggctttgctgatacaggagttcggaaaaaaatacggtaattacttttctatcttatcagcaatctccaatggtaagaacaccctgccggaaatggaagcggttatgggtggaatgagtctgggcggacaattgaagagattggaggaagattatgatctggtaaagaagaaacggcccatactctccaaagagggttcccaaaccgtccgttatgaagtttcggatatgtttttacgtttctggttccggtattttatcaagtatcaaaattatatagagatacagaattttgaacgcttggctgatattatgaaaaaggattatccgacattctccggtttggctttggaaatgtatttccgccaaaagatgatggaaagcaaggaatttgcagatataggttcttggtggcaaggcaagaataataaagatcaggatgaaatagatattgtcggactatatgcggaagagaaaaaagctctggtggcagaggtgaaaagacaatccaaaaatttcaagccggatttgtttgcactcaaagtagaggaattacggaaaaaagtcttgtttaagtatgagatagagagcaggcttttttcaatggaggaaatgtaaatgtgaattttatttaaataccatgattgccaaaattgatattgaaagatttggattgttctcaaattattattggaaacaacatattggaacagaaaataatcaaatttttaataaaatgaatattatatatggacgaaattattcaggtaaaactactttatctcgaatatttcgctgtatagaaatgaaacagttacccaataattatcataatggcattttcactataactactgataattcaactataactaatatgaatttagtttgttctgataaagtaagggtgtataatacagattttgtcaaagaaaatttaagttggctaagtaatgaggtgggcgacataaaaccttttacattattgggatctaacaatgtaaatgctgagaaaagaataacagaaattaatgaagaattaggtggtatagatgagaaaaaaggattactttatcgaaagtggcaaatagaagaaaacttgcaaaaaagaaaactacaatttactaaagctaaagagaaggttcagacattactaaccaataaagctaatagagagataaaagtaaacaattactatgtaaaacaaggcactaattataatgttaaaacaattcaattagaaattgacgaaattatagtttccggaaaaaattttataataaatgaaaaagagaaggccattcgtagaaagagaattgacgaatctgtaaaacaggaaatagcaccattacctataacaaagccacatctctcggaatatataaaggaggttcaagagcttctaaaacgtaagatcgttttaacgcaaacacttgaagaattagtaactaatagtctattgcaagaatgggtggataaagggcgtgtgcttaataagaatagggaaacttgtgctttttgtggaggaattattacacctgatcgttggaagttattggatgcccattttagcaaggaatcagaggaactaaaaaaaagtattgaagaactatttgataaacttgaaagatccaagaaatcacttgatggctttctcgagacaaggggagtaaaacaggaaaatatttatgagattttccaagatgagtacaatcaatattacaaagaatggactatatatatagaccagtacagagatacaatagactttcttatttcccaattacaagagagatataatgatatattcactccaagggaaataagcaatattgttgattgctcggagaatatcattgaaataattaaccgctttaattctttattacagaaaaacaaaaacaaatcttctactattgcaaaagataaagatatttatcgaagagaattaagatattctgaaatacaatcttttattaagacaattgagtatgaaaggatttgtaaggattggaaaaacgaagaaaaatccatcaatagcgaggaaaaaaaacttgatgatttgataaagactattggagagttaagacaagaaaagcaaacaaaagaattagaagcaaaggatgaaggagaagctgccaaaagaataaatgaacatttatcagatttttttgggcatgatagtttgactttggagccagcacttatcactgaatctaatacacccttaacgagatttataataaaaagaggtgataaagaagctcacaatttaagtgaaggtgaatgcagcctaatttctttcttctattttattgcaaaaatagaagatgaattgaatggagtagatcatgataaactgataatatatattgatgatcctatttccagtcttgataataatcatatcttttttatgtatagtcttattgaaactattgttgcaaaaaaaggacaatatggacaattgtttatttctacgcataatttagatttcttaaagtatttgaagagattaaccttaccaatagatataaacagaaagcctttagttcaatattttttaattgagaaacgaaaaaaaatgagtgaggcaattagttgcttaaaattgatgccatcttatttaaaagattatgtaaccgaatataattttttatttcatgaaatttataatatggcaaaagttacaactaaaggagataaagtaaagatgatagaaaatcaatacacccatttttacaatctacccaataatatgcgaaagtttttggaatgctatttatattatagatatcctaatactgataaccctttggctaatttggataaattatttgataatcacattccttgtttagtaaatagagtggtcaatgaatattcccatttagcatggggaaataggggaatcttacctgttgatgttaatgaagcagaaaaagtcgcaaaacatattttacatattataagagagaaagacaatgaacattattgtgcattatgtgacagcataaaggttgatccaaatattgatttagagtaaaaatagaagcgctccactatgcttttggaacgcttttatttttataacttcagcttgggtttgggcttttcgggctggtcaggattgggatcgtccttgttgccgggcttggggacacctccgatgacgagctttccgtcgagtgtatccattgcctctttgatgctgatgctttggggcatttcgcttagtttgggcgggatgcgctgcctgtcggtaaggaaatcgggcatccggtggacataagactcggcgggggcgtgtctctcggaactcaaggcaatctgctttgtgtcactggcggagaaggcacgggaaaaagtaactatgtggcggcgttgattgtcggtgctatccgttcttccggaacggatgtggatgtgcttgagtgttacgctccacgaaaacagcaagaacaaggcagtcctgttctatgacatggaacagagcaaagtgcagctgtataagaatatcatcaacctgctgcgtcgttgcagacgtgagtcgatactggaatggtttaaggcgtattaccttacgggaatgagccggaaagagtgcttgctttccattatccaaatatggtggcatctggtagtgatagacagaattgcggatttgataaaatgcgccaacgatgaagcgaagagcataaccgtcgtggaagaacaatggcttctgccatcttttcacgaatggtagaacagagagatgccgtaaattttcatctgtcattatattgccgacgggatatcaaatgaggaatctctgaatgatactctctcaacttaacaaataaaagggattcgctgttaataccaatggatccggaagccatgttgagagcaaccacttccaaataagaaaatcagggaacgaccccacgctgaggtaaatttccttgcccgttgatcaaattccctgtaacagcttgtggatgtcgctaaattttgcgaatattgtatatatgttgtgcatatatgaattaaaaacagattgtaaaaatagggaatatatattatgaaattccctattttcgtgaaatactccgtatcaaaaaactctgccgccttgtcgggttcagcgatgggcagacagcaacgttcgtcaagggaaaaccgttggaatacgcaggggaactctattcggaggaacacaagcggaaattcaagaccgaaaaggtgagggcaagtgctgaaagccctgacggacgggactaaattgcttcttgccatcgaccgaaagcccattgccgagtgattcaaggagcaattcgacaagctaaggcagagcatacaccaccccatgcagctacgaaggaaaggcagggaggctataaatgttaaatcccgtccgatttaccgaaaaaagtgcggtgtgccgttcgtggtgtaccgcactttttctatatttgtaattatacaggataaagaaagggataaacatttcaagataatggattatcattataaagaagatgtaaacaatcatacacattaggaattgttttttgaagtaatggatagaataattttattttttttaggtagtgtattacttttatcgggctgcaagaatagtaaacagccggaaggctataattctgttaatattatcgaatatgttaatatttacgatgaaaacaacaggattctaactgcacagggtagtgaatatgactatctctattttggagacaataaagataaagggatcttggcagcgacaaataattttacaaagacatatagttatgataatgattcttactgctataccgtagaggagcccttgtcaggatcattgctaaaaacaatgagatatactgaaaatagcatagaagaacttgtattggaaaataataaggatacatttagttattctttttccctctattatgataagaataaacctaagtataaaaaaagtattataatattaggagatgcccccttttctgactcaagatatgaggaatactactactatgacaataatggaaataataccaagaaaatccgtcatgccttgaacaccggggaaagagaagaaacctataaatttaatgatacggattataaggaagctgttaatcttgtcccttcttccgattacaaacaaaacatcgaatgttcattgaaacaaactgtcaatgataccttaatcactcggattaccttaaacggtgtacttgatagagtgatgaaggaatacacgatcggaaaaaagaaaattaaggaagagtttgacaatggtatgactttagtcaataaagaaacagagtatgaagaaaacggactgagggtaaacgtcaatcatactttaagaaatacaggctactcaaccgacagtatctattatgaaggaaacaaaaaagttaagcacatttataattctgactataatggcaccataacacttgaaatttcagaatatgatgaacaaggaaatataataaagaaaacaaaaaaactccgatgggagtcagataatgaagttacccgttgaatgcaaacttatttatacataaatcaagttgtcaagtgtatgaaaaacatgagcataatgccaactggaaatataagcaatcccgtttttgtatttgtgttattcctgtttgtctgcgtgcaaatgggttgtgcacatcgtcgtgctgtcccattcaaccggaaaggttggaacgaatgggacggccattatgcaaaatacggaaatcgagggtgtcaattcgagctaagaataaatgataatgtaacagcagaagtcaaactataaactatatctgaaatgaaaacgatatatagtcttttatatggaatgcttgtactctttagcgcctgtgggcaatctaaggtacaagaaaaatttgataccataacaacgtacagctatacaaacagttatggtaaagatggacgcttggccgaggttcttatcaaacaacaatcacaatttctggagaatggagcatatatttcgggacgggctgttgaaattactcaaagatataactacccggataatgatacgtacatgattacagagactgatgatttatctcccaatgaaatatcaacagtaatcaaaggtaaaacttttgaaaagtattatacactcaaaaataatgataccattaagtttcgtatgcgtacttatacggatgcaacacaatcgaagccactggtggaaagagaaaactatacactttccggattcccaattactgatgaagaggaaaacataaatatagaatcaaattattattatgatgataaaggtgatttaatcaaaataataaagagggattttaatagcggtgaagttgtcgaaacatatgggcttaaagaagttattgcagatacgacaattatttattaccgcatcaatacggatacttcatatgctgtaaaacgatacatagataatggcaaaaccattgagattacattcgatgaaaatcagaagccgcagaataaaatcaccaattatacggccaatggctttgatattaaagtaagagaatcagtaaaaaacggaattattacagttgatagcatctatcagataaaaggaaaaaaggttagaagtgtttccgtctcgcctgaaaataaatcggtcactacattagaatatgacggaaaaggcaatattacaaaggaaatttgcaaatcaaagtcggatattactatctcaaatgaagatctgaatgagatgattcaacgttataagatgatatgaaaccagaaagtgcatataagttggtaaaaatatggagccatacgaatgcaacaatcatgactttgcttttcgtaattcaatgtcattctctttggcatgcattctgtgtaatttttactatgccgctactcggtattggtacaatagtaatgtatgagaatcaagctaatgattacaccgttctgaaggaaaatctgacagaaaagaagaaaaaggaaatgccctatatccgttgggacgaagtaatcaaagatgcacgtaaagactatttatggggagtaatcggtagtataatcctaaacattatatattccgggtttataatatttatcctatggatgataatatatgaaggagtgtcgactattttttcataaattcatttcaccatacaaagaaaaattggaaattatggaacaaaaaacaatgaaaggtcataaacattctcttaataagtatcatcaatgggctgatgaggttcaagtaggaaaagaggcagaacaaaggaaagaacggaaatggaaaaagatttttttcattatggcattatgcgttagtttatcattttgtgctgtattttttgtcacctgttctctttttgaaacggcaacaatcactaatcttgctctttcggtagtaatgatgttagttattacttctgcttggcttattatgatactttatttaataatccccaagatatatcctaaaattcctcttatcaataacgtccaacttaagtattatggttgtttcgatttcggaaataaatgggttagtgaaaatatagaggtatttaagcagtttgatgacaagaaaatcatcatagatgcaacctccccgactcgaaatggtgcagcaattttgtatattgcaattttgataacattggcattatttgatttctatcctaaagtatatgacaacctattagatggagatatctgggggactactcaagcttatactgtttatcacagaattctggatgagcgaggtgtattatttacaaataatgataacgtcatgataaataaactctcgtttgcaagcaatatggcattagcatctgtttatgcaattttcattctattagcactactttccgttttatccccccgacgaacagttatcttcgaccgggaaaagaaaacaatcaccattcctccgcgttggaggatacacaaagcggaaactataccgttttatgatgccgttattacatttggtgctaaagtagatcaaaaatcatttaagggagatgaggaaatagtaatagctaattacaaacacctcgtcaagggagtttctttgcagtttgctggtcgtacaaacgggtattgttttgctcgtttgattcaagcttatatgactgaagacgatttatcaaatcatcctgaatttgaagctttcaaacagatacaagaggaaatgagaataaacaaactacggaaagaggctgaaaagcaataatacaatgaaaagccataaagaatataaaaatgaatatcaacactggcttgatgaaattcaggcattaaataaagcagtgcaacatgatgcgaaaaaatggaaaattgtaggctgttttttcgctctgtgtgcgagtctatcattctgtggttcattttttgcggcttactttatctgtgagatagcaacaataaccaacttgactttatctgtaggtgttacaatattaggattttgcttttggttagtatttatattttacaaagtggcttctaaagttttcccaaaaattcctcttattaacaatgacgaacttggacattatggttgttttgatttccgagatgaatgggtgtataaatatattgatgtatttaaacaattcgatgagaaaagaatagtgattgatgcaagtaatcatgataaagttggagtgtttttgacttgtcttttggcttttgttttacttgctctattggaaatgtttccctttagagacggaaataataatttcgtagataattttctaattgtttacgcttatacgattgtattgatattgggaataccgatgcttttatccccccgaaggacaattgtctttgaccgggaaaagaaaacaatcactattcctcgccgatggctaatccataaagaagaaacgataccatttcaaaaagcggtgatttcctttgggcaggatgctctccgaggaattgatggcgtagtcatagccaattaccagcatcttgttggtgaagtttctttgcagtttgccggtcgtacaaacgggtattgttttgcccgtttgattcaagcttatatgactgaagaagatttatcaaactatcccgaatttgaaactttcaggcaaatacaggaagaaatcaatataaacagactatgacagaaaaacaggtgacatgaaaaagcagaaaaaaaagagcaacaagcaatcgaggcgtgaaatcatagccgatgtcaagcgtagagaggccgagtggagaaaggaaaggagaaaagaaaggtggcgtatatgcaaatcccatatcatattgtggggaacattcatatctttctttccattacttgtatttgtcacggggtcagatatacgtaacaccttcaccaatatcatacttggattgataaccattaacgggtggatttgcctgtgcatgtatttgctgtttaaagaagcccggaatctgaccgtctggatacctttgaaaaatggcgaaagtacgggaaatgcgcaatggttaccggattcttcagggattccggtagagcctgaatatttaagccggtgtgatgacaaacagattgttattgataatgacggcatctcgatgagaatggtgattttcctgatctggctttttgtatttttagtttcggtttgcgccggtttaattccttcaaaccttacaactgaagattatggaagtatattactgcttcttgagctgtacttgattatcctgacagcaggaataagtgccattctacagccttggcggcggattgtttttgatcgtgtttccaagaccgtaacgataccgggacgacttctgttgcataaaaaagaaacgataccttatagtcagtctgaactcacgattcgttattataggcatagttcacggcttgcagcggatataataatttccaatgccaattcatccagtctgttaagtggagtctccttgatgcccggtgatctggataaggccaggcgttttgcacgtttcatacaactatacatggaagaagaggagttgtcggacataccggaatttgagaaatacagaagtaaggtaaacgtttaaattgaaataataacgggttatgattctgtatgattatttattttactgttcctataaaatgggtatgaggtcacataactttgacggattaccagtgttagcaggcatgatgatggttatacccaatatggctatacattaacaataggaggtttacagcaaggaatcatcaataagaaactcaactaaggtgtttgcaccggcaagtgtgacgcttattgttccatcaaaagaagtgctatacaatgaagataagcattattctaaaaattctcggattatcaattgcattagcaatgatatcattttttattcttaactacatggcacaaggtagattaaatagagtagttaatccaacttttgatataaccaaagttgttgcgattgagcgtgcttctatttcggagcattcagaagtctacaacgacagtagttttatagagtatgaatgcgtatataaggattcttgtctggatttggtaaatctggcgtgttgatccgttatttcatcatgtggaagatatagtggaagttacaaatactcccatatcatttcctaattctttttttccaaatttaatagctcctgaaccttatagcgtgagtgttcagataacttctttttacaatgtctactcaatgccctatagttctctaaataaggtgaaattatatattaaagggcagattaaaaataaaattagtgaatcgacaactaccgttaagtacgaagtatcagcaaatcgaatagacatagctttgaacaatagttcagaggtagggctttcctataatcttggtatagacaacaatagggttgacgctgaattagttttaatctacataatggtaatttgtatgttgtggtattgacaaaagcacttgatgtaaacaatttgctgaaaaaatatttgccataaaggatagtagtaccttattatgatataaaatatgaaactacttaaattaagagcaaataaagaaagttttcatacaatttttaaatcaaaaggtatttctctgattgtagccaaaaagagaactgaaaacgaaagaaacacatataatagcgttggaaaatccttatcaattgttttaatacatttttgtcttgcctcaaataaaatacctgtatttgaggaattgcttcaagggtggatattctatcttgattttgagatagatggtaaagaatatgcttcttatcgaacaactgaacaacaagatgtaatatttttgaatgatgagaagatgtctttagctgagttcagaagtttcatgggacaagaggtgtttggattgacaacccctgttaattatctaacatttagaagtcttatttcaagattcattcgtcctaaaagagttagctgaatataggatggagttgtctaagttggagcaatataagcaattggtaaaagagtataaggctaagttagagaagtaaaaaaagagtttgcggatgaaaatctttccaccaataaataccttgaagaagttgaatctttaataaagaaaaatattttaacatttcggtctttgacggaacaattctatgaagataaaacatccggtatcacaattgaaaataattctggaacaaataaattgcgctttgatataaaggctaaaataatggatgatacgggtgatggcgtaaatgaagttagaactttctgctttgactggactttattgaaaggacaatataatcattctgtaaaatttatttttcatgatagccgattggtttcagaaaatgatcctcgccaagttgctacaatgttgaaaattgcacaaaaagaatgtgtgaacaatattttcagtatatattgtctgttaatcaatcaacattagatttattagcaaaagagttatcagaggaagaatataaggcattaatagtagatacggaggttttggagttgaatgatatttcagatactaataaattattgggtattcaacttgatttgaattatacgaaagaataaaagatacttttaactatataagatgctgcttttacccaaaaaagctggattttttatatctaccgaatgaaatattactgtagtaaactttacggaggtaaaatttcggttgtgtgataatataacccccacttcgccgcttcgttggaagctggcggggtggggttattttatggcttcggttatagggactattacttcagcctggttttgggcttttcgggctgatctgaatcgggatcgtccttgttgccggacttggggacacctccgatgacgagcttgccgccgagtgtgtccattgcctctttgatgctgatgctttggggcattccgcttagtttgggcggagtgcgctgcctgtcggtaaggaagtcgggcatccggtggacataaggctcggctgggggcgtgtcctgtgtggggacactgttcggtgagggactgccgggcggagcatcgacgacggggatgccggcgacgggggcgttatcctgtccgtcgggtaccgaccggggcggcacgacgtcgatcactccgtcgttgttcttttcctgcgcatccactgatttgagggagagtagtatcttacggtcaagggcggcaaggtcggctttgagctgcttcagctcgtcctcctttttccagacttccccgacgacctgttccaggacggggagttccttctcaatggcttcgttgtccctcgtgtatttctctatcaggcgggggatgctgtcgaaggcgttgatgaagttctggcaggcggttttcggatcgaccgccagacgcccgttgttgtagttgtagaggaagttgccttcgccacgcacgaaaaaacggttctcgcagaagtccagaccgtccttgacggtggtatcggtcttgacaacgatgtcgaaaccatagagcgagccgatgaccttcggctggccgtgcgtgcgttccctgtcctctatctcgtggagcttggcggcaatcactttcggatcatcgcttgccacgccgtcaattttcaaggggttgagcctgttgccctccttgtcgtactgcatacggctctcgatggctgccttgtccttcctgacgcgggcgataatgtcatcgttgcttgcccggttcgccaggaaagtttccagtttgatgcgtgattctcccttgccacgctggaaggctttgcgctcaccttccatgccggcaatccgtttctccaaccgtgccttgtcgagcaggtcggtatttccggagagcaccgccacgtattcggagaagggtatgcctcccttctcgtccatgcctccctcgtcgatggtacggcagcccatgttgttctgtttgagctgggtgatgaaaagctgcttgttgtagagcaggttgaacttgtagctgtcaagcgacttctccacggcgtagattattacgtccaccttgttgtccgcatagagcttggccacttcgtttcccttgcggataccccgaccgttccgctgctgcaagtccgaaggccgccacggtgcgtcgaggtgatggatggcgacacaccgcttctgggcgttgactcccgtgcccagcatttcagtagagccgaagagaacacgtatctttccctcgttcatcgcctcgatcatcgccttgcgtttcttctcggtcttggcttcctgaatgaaacgtatctggtcttcggggatgccgtgatcctccaccaacttgcgcttgatctcgctgtacggattccactggtcgggcttgtaagttcccaagtccgaaaagacgaactgcgtccctttgtgcccggcgtatttattgtaatacttcgcaatcatatcggcgcaatgggtggccttgttgtccttgtcgtcgccataggacagcggatcgatgagccgcatgtcgagcgacatctttcgggcgtagtcggtggcgatgagcatcttcgccttctcctccctctcgttcagtggcgggcggcccagtacggtggcattgccggtcttggcgaactcgatgagcttctgtatgaactccctctggtcgggcgtcggggggatgttgtgcagtatctcgttcttctccggccggtcgatgccgatgtcggctgcggtacggaagtcggtaatttcagaatagaacgaggcaagttccggaaccttgataaagtaacggaaacgctctttctgcaccacctcgttggtgacggagaactcgtaatcgacggactttcgggcaaataccgccgcccatgcgtcaaaggagttgatcccctgacgctccaactccctgggacgcaggtacttgaagagcaggtacagttcggtcagcgagttggaaatagtggttcccgacaggaaggtggctcccaaatccttgccggtgcgctgctggatggtacgcagggcgaacagcatgttgagcgcacgttggctgccctcgctgtttcccagccccgccacacggtcgtgccgggtggtgaacatcaggttcttgaaccggtgcgattcatcgacaaagaggtggtcgatgcccatgcgcttgaagtccgccacgtcgtccttgcgggtctcgatctcgtggagcagctctttcagtctggcctcaaggttcatcttacgcttctccatgcccttgatctgtgcgttgcttacttccgcaccctgctggtagaggacttcgagattctcttccacgctgtccagctcctgttgcaggatgtcacgctggatttcgggggactgtggtatcatgccgaactgctcgtgcgagaggatgatggcatcccagtcgttgttcttcatctgatggaagatctcgacacggcgttccggcgtgaagtcctccttgccgggatagaggactttggcgttggggtaggcggtggcgaaagtctgtgcgatctcgtgaatattcgccttcaggccggtgataaggggcttgttcgccagtcccagacgtttcatctcgtaggcggcacagcacatgatgagcgtcttgccgccgcccacctcgtgatcggcgatcccccctccgttctgcttgagcatccagatgcagtccttctggctggggtacaggtcgggaatgcccaagcccttgaggtcgaggccgggaaagctctggtgcgatccgtcgtacttgggacggacgaagcaattgaacttgcggttgtacatgtccgccattttccgcttgaactccggtgactgctccatgagccagtcggagaagccgttacggatctcgtcaatcttgctgttggcgagcaaggtgacttcgggatcacgtatcttcatctcgttgcccgctttgtccaagacggttttggtgatgttgggcgtggtgttgtggatggcatggcgcataagggcgatgccgttgaagatgcgactttccgaacgcaccgaatactggttcatgatgcgtggggaggtcatgtcggccctgatgctgtactcgtcgctgctggcggtatagcggacggacacatctgtatcgaacagccatgaggcatagcggctgtaaaccgccgccggtatccaacgctcgccgaaattaaaatccagatcctcgaaaggtatgggcgtgggaagcgactgccgcaaggcttcgagagaaatacgggcctcgccgttgtcgggatgcgactgcaaatattcttcgatatgttcggctttggccatgacgttgccggaaatgaaacggtcggcaatctcgtagttcttcgagaggggattgtaaaatatccgcccacgcagttcttccaacagggcggactgcgacttgtcggtcagggactccatgtacgacatgttcacgttgccatacttgttgagcgaggcggtgagcgcctcgtgcacgtcgtcggtatgggtgatctcgttgatgttgtacgaaacgggatggtcgaagatgtcggccttgaccgcccggccgtcgatgtaacgctccagcgacagtatctcacggttgcccgcatccatgcggaacaggtcgatgttcttcttgtcgttcaggttgccgaactgacggatgaaatcatcgtaaagggtgttgagcatggtgcgcaacgccggattttcggcatgggtggcggcttcgttctcgtacaggtgatggtaggtgtcacgtatctcgatgtatagcgacgcacggcgtcgctggcgttcgggcagatccaacgggttgaataccggtgcggcctcgccgatggcggaaaggtagcctatctgcccgtcgtcgtccacaagagagccgttacggtggtgcccctgtaggtcggccggataaggacggggcttcatgcgctcctgacgtgcggcctcttcctcctgccggcggcgttcccgttcctgacgttcctgctcctgccgctctttctcttggggagccggttcggtcgggacggtctgcatggcggaatgttgctccaacggcggcatatcgaagagggacaattgtccggagtcctcctttttgcgccttgttttcctttttctgacctgtgaacgctcctcttgggtgaagccgaaaaggtcgtacagggacatgaccggctccggcgtggtctttgcggcggttggccgggcttccgctgacggttgctccggcgtgagagtcccacgctccacctgtaccgtctgtcgatccactgaagtggaatgtccgttcatgttaccggaccggttgatttcccgcacctgtgcgatgcgttgcgacatggtttctgccggacggctcaccagattgcggaactcctgcacgggtgaatggcggagatacaggtccaggtcgagctgttccgagaggttgcggtcaaggaaatacttcatgtcggcggcgatggcttccatacccccgtcatgcaggtagatgcgtgccggctttccgtagggatcggtaccgacatgggcacgtgtatgcacaatggcggcggtatgctcgaaatactcgttctgtgttgtcccgtcggcctgcgtgccgacttcgacgaaagaccgttcgagcggggtgtattccctttgggaaagtgtgtccttctgcaagatgaccaggtcgctgcccacctccgtaccggcataatctgtaaagaggttgttgggcaggcggacagccgataacagccgggattggttcatcaggtattgccttacgggataggccatagcggagttcatcaccccctgcgaggtgatgaaggcaaggatgcctccctcacggacggcatccagccctttggcgaagaaatagttgtgcaggctgttcagcgcaaaacgcctggccgtgccgttgtcgaaggacgggtcgaaaacacgtatgtcgccgaaggggatgttgctgctcaccacgtcgaaatagccgttgcgatgcgggggcagttcctcgaagcccttgatattgacctgtgcttcgggatggagccgggcgaggatgcggccggtaagcaaatccttttcataggcgacaatttcggggccgttgccggctgcggagtggaattgcggttggaaggctgaaacaaaattgccggttcccgatgaaggatcgaggaaacggccgggcgacactccgtgttcgcccaaagaagaggcaatggcattgacaatcgccggcggtgtgtagaaagcggtgaaggtggatgccttcacgctttccaccagtcgcttgtattcacgttcgtcagcggctccgtcatgcaggacgttgtgaagttccgtaaccagggggaacagttcacggtcggcctgtgtccagcggagtatgtcggtgagtttcccgaaaggggaaagaaccgccttgatacctccgaacccggagtaggcggcgagtgtgcccgcttcctccggtgtggcggtgcgttgttccttctccaaacggaacatcagccggattgcctctatattgtccctgagatgtgcctttttattataagccattctcttccagccagattacaaccgtacctgtcagctcgtcatagagctgctcgaactccgggctgaacatgaaatcatccgagagcgtatagccggagaaggccttccggcattcgggaagcaactgcaaggccacgctgcgtgcgctgccttcggggacttcggcggcgaactcgttccagaggacggtgaccagcgtgtccaaaggtgagaaatgcaacccctgaaaaagcagggcgttcgcctgttgcgccgcatcgtcgtaggtcaggccggaacggatggctgcgctgaaggcttcggcggcctgatcgctgcggatggtgacgaaagacccgtcatccgccaagtccggatgcgactcacgcaggaaggacaacagggtaagacggtagtaagataattcatccggttcttccgctacggataccggcacattggatttattctgattcatataattatcggattattaagtgatacaattcggacgggttatttcttcctgccgcttttcttttcctgcggtttcctgtccgggaaggagtaacttatggtaaagtcaggattaagcaccagtgcggcatcgaagctcttgccctcacggctcttgaagcctttgacaagaggagtgcggcctttggtcgccagctcgatgatctgtccgtcggtcagtatcttacctcccttgttacggaacagggtgaagctgcaatcgacatcggcgcatttggcaaccttgtcgaagaacaggatgcggctcttcctgcacttgggacaagtgcattgctctcctgaaggagcgacatcaagggtggcggccagcagttcggtaacgatctgtgcggtatagacctctatgttccggcggaaagagaaggcatcggcctctccggtttctattttggcgagggtgttctcccacgccgctgtcatttcgacgtcggcaatctttttgtcctttaccgtatcgtaaaccgccagtcctttttcggtaggcacaaggttcttcttgtcccggcgtatatagtcacgggcaaacaatgtttcgatgacagctgcacgagtggccggagtgccgataccgatctcacggattccggcacgcagttgttcgtcgctgatctctttgccgcaatgctccatggcggagagcagtgaactctcggtatgcagtggtttgggcttggtctgtttctccactgtttcggaggcgagcagtggcagggtttcacccgtttgcagtcccggcaacgtggtttcctccacctcctcttccggctcgccacacacggcacgccaaccggcggacttgatgaccgcactcttgagggtgaatatctcaccgcctgcggacaaggcaacttcggtcatttccttgacgcaacatggcaagaaggcttcgagcaggcgtgcggcaaccatttcatagatagcctgctcgtcctgcgacagaccttcgggcaggttctcggtgatgagaagcgcatggtggtcggtgactttggcatcatctaccggacggcggttgagcggtgcgtccggcaagacggatgcggtggcggtgaaacgtggatattgccgcaggagcattatgcgcgaggggatctcgtcgaaaacatcctcggatatataacggctgccggtacgtggatagcttagcactttcttctcgtacaggctttgcgcaagcgtgagcgtcttgtctgcggagaagtccagtttgctgttggcctctttctgcaaggcggtcaggtcatagagcaacggcggctcttgaacggcctccctgcgttctacggaagtgacggcaagcataccgccgtccttaacctcacgaagcttggcggtggctgtgtcgagatcatcgaagcggttctgtgagagtgcggaaaagtcgatgccgtttttagagaccgaaacctttatccggaaatatgtccgggactcgaactgcctgttctcccggtagcgtgagcagatcatcgccaatgtgggtgtctgtacccgtcccagggagaacacgccctgtccggcggcaaggctgagtgcctgagagctgttgatgcccacgagccagtccgcctcgctgcgggctttggcggagaggtaaaggttgtcgtaaaggcttccctccctgagattccgcaatccctcacggatggccttgtcggtgagcgaggagatccacagacgggcaaagggtttggtacaaccgagatagttgtacacgtaacggaaaatcaactcaccctcacgaccagcgtcggtggcgacgatgatggattcgcatctgtcgaacagctcccggatcactcccaattgcctgacgactccgggatcgtccttgtaagccttaccctctcgcacctgacggggaacaagcctgaactcttgtggcaatatgggcaggtgttcccgacggaaaccggagagaccgtaactttcgggcatggcaagaccgaccagatgcccgaatgcccatgccacggcatatccgtcccccattagatacccctctttccgttggcgtgcgcccactacggacgctatggcctgcgccacgctgggcttttctgcaatgataactttcatatataatgtattatttatgtgaatggttaaatggatactcctttcttatcggttttctgtaccgggcggttctggctgacggtgttttccggcttcgtgctgtcctgacggacggccgcctgttgcgactgtccctgctttttgctcttgtccgggttccatttgaagaaatcgaactttgcccgctcgtggttgacacggacgaaagcactgaacaagtttccctcgttgtcggtcatgttcttgatatggactgtcttgccggcggctaacttctcccgtacctcgggtgtcagcccgacgcctttgagcacctgtggtatgaccagttcacggcttcgcatctgtgtctctgattgcgcctgtttgcgattcagtcccctgaagtcataagtgaagccgcccttgcagacgttatactggaggcgtgcgtcgtaatatccctgtttcttttcggaccacatgttctcaaccagcacggactcgccccgtgccagccttgtggtctggtcgtcggagagtcgtacccggttcacttcctgcggtatggtgatttcactgaccggaacatggtgcaggcggttggttttgggattgagcgagagcagacacgattcacgcactcctctggcaagttccagctcaacgacacaaccggcattgttgctcctggaaagattctctttcacttcgggagaaagctccgtacccatgtacggccggtccagttcgggataccgcttgcagcattccacgttcaggaccggtttgccgccggctgattccaccagacgaatgcaggccggcgtttcaaagtcgataccctcgaaggagatcctgatgtcgaggactgcggactcgtggccgttcagcaggcgttgtatgcccgtttcgcccaacgattcgggagttacgcccatgcgtgcgagctgctgccaatccacctcgtccactccccaacgggtggtctgttgcggagtgtcgcctgtgatgctctgctcctgtgccggttgccggatgtcaatggcgtaactggaaagaagctgttcgttctctttgggaaacttgaatatttccaccagctctttggctgcggataacatttccaccggcaggtggtagaagcggaagtccgacggtcgatcatactggcggttcatgttggagaagaacgttccgatcacggactcgttgcggtcgatgtgcagaaaagtctcggagggctttgcctgtgccagcggtttggtgcggagtgaaccgtcaggctcaataccctgaacgatgtgcggcgtgttaccgtcggaggcgttggtgactaccaatgcctcgttcttgaaatctttgagattgtccataaatcaatcggattaaattgtgaaacaataaagttaattgcggtacgaaggtaggcttaagtggttgtaggacgagagggaacgtgacgatcgggtacaagtggctaccggttggcatgaaatgtctcctgtttcctattctgtgtgattcgttttatacatcgcaggcaacatcaagacgttgcggaagaatcattcatcggatattttagatgatccgaacggcgggccggaaaagaacggtcccgtttttgagtacatgacagagaatacggtggggtaggaggattatcaagaaaagtatcccatgggtatcggccagctttttttgatattgtgacttttccgggagtcatgaaatgttttccttcgagataaaactaagaatagttaatagaataaatgcttaaacaacagcaaatatatccttgccttatttatcagggtagtaccatactgtaattttggggatggctattgttgctttgtctgtatttaattattgaccaatgggagattctcacagcttttctgcctttttatttatacaactttttatttcaaacagtgattgatttattcaactatttgaatatttgttgttttagtatcggattatagaaaaaagtaatgttttagcgaccgtcctatttttatcattttgtgttgcattactattggaaaactttttcacaggcaaaaataccagcttttctgaaaatatgaaattttgaaacgtttttctttcggaagcatatcaatattgattgatcaatcaattggacgtttagacggcaaatagagtgtttaggaagatattggcgggtagtgtgcctctgcattcgaaataaattttgtatctgacacatggggaagattcttcaaagccgaatctcgtatttttctattttcctccatagagctaactccacatgccaatttgtaagggaaggtttcatcctccggggcacaaagatcctctattcggtttgctcgtactgtatttttgatctttgtgccccagacaaatagtttatgatttgttggctggttttcggtaaataagaaaaaatgttattttttttggtggattatccactttgtcattttatcactatatatgtagttgacgagatgccgggaataattttaatgagtatcctgataccatagcgtttgattataatcatttgctttaacattatggcttggttcagatgttgttattccagaatatgaatttattggcactgcaccacggcttgctgagtaatatttttctgtgtgtgttttgtaaggaactactttgtttaaagtttcagaaaattgtaacagcagagtgctgtcgtttttacataatacttttacataatccccgtaatcgtaaaaaataacaggactgtatccatccataggctgtacaaaaccttcttgggtattatcaaatatgtattgttggtttattcgtttcatcagtgccgccaaattatctaattcgctacagtttgttacggctaaagttccataaggatattgataggtggaataaaattgatggaaagcatcacatgccgccttataatttggttctcttgataaaagatgttttcccattgtggaataaggcatgccgaatgccattatttccgtggggcaagctattatgtaatctgttatatgacgtagctcgtacgcagtctctaaggaggacatatagcaatcgtcgaataagatatattccatagataatccactattttttatactgttggaaagggtttttatatctgtttggtattcggcggatagcccgccaaagaaacgtgtttgaggtacattcttgtattcccagtgatgcctgaaatcctgcaacattcttgacttgctgccattaacaggcagccatcccataccatggcaacctataatcatggaataggactttgccggggcaaatgtcttcatatcattgagaatatctgttaatacaggttctatggtaaattggggattttcgtattctttcaaaatggaatggatacaatttccatttttcagaataatttcaaacatttgggctttgatggaacttgtagaaagaaaaacaatcactctttcattcttcaagcttgtttcttttatggcatattccatatcagaaatattgttatagaaatagtctattaaatcctcggaccatgggaaatacataaaggtggttctttgattaatttccggttcaaattcttctttttcgcaggagaataagacgaataaaaaagataagagtgttattagattcttgattcccatataacttttatttataattttatactcacttttattctgccaaaaatcttttatgactgcaaatttagaaatttaagtcgaaaacagtaatagcttgtttcaaattgttgcaattctacctggaaacatattttaatacagttaacattgttgataaaatatcaacttacccaattcgattcatatggtgttttgtttgctgttttgcttctttcatgcgatttttgcatttttttatgcaaacagttaattcatataatcatttgtaatgtatttatagttatggcaacagtaaaaacggtattagtaaaggggcggtgtaatagtcgcggggcctatccattggctgtgcaggtccttcataaacggaaaaagaaagttttttatacaggatacagcattaccccctgtgagtttgattcttttagcggacgagtactctttaatggtgcatataccatggaaactgtccgacgcatgaaccgtacatgccggaaaatttgtaaaatcttggataaagccataggcatattggaaagggagggtaatgaatatacgacatgtgatatagccagagtctatgaaaccctgactggcaaagtgggtttttacagctatttccgtgagagaatccgtgtgcttttcgacaccgggcatgaagggacggcaaaagcgtatgaggcgaccctgcattccatgcaaaaacatttgtgtaagactgattttccatttgcacatctttcttcccgccttgtcattaagtatcgtgacactctcctggaggccggtgtgggcaagaatacgatagggttttatttacataatatgaaagcggtatacaggcgtggatgtcttgaattgaatctggtatttccttcacctttttgcaatatcagaatccggtctgaaaagaccgtcaaacaaagtcttcctatgaatcaggtgaagtctcttgccaacctgtcactttcagtcggaacaccggaatgcttggccagagatgtttttatgttcagtatctatactcgcggaatgtcattcgtagatattgcttttctaaaaaagagcgatatttttcccggggtaatccgctatagaaggcagaagaccggccagttgcttgaaataggtattaaccggcagatacagagtttgctggaaaggtatggagatacttcgggtgactatcttttccctctggttgatgaatctgaaactccttattcggggtataaaaaagcttataacaagataaggtatgcactgaaaaagatttcccaaagaatcgatataaatattcctttgcgtctgcatgctgcccgtcactgctgggcaacaatggcccgtgaaaacggtaccccgcttcataccatcagtgaatgtttggggcattcttcggagaaagtgaccagaatttatctgaaggaacttgaccggtcggtactggacgaagtgaataatcacatagcagataatatatgttaattttatagttatggtgtcctatttaattggggatatgatatatttgcaagcatgctcttgtattctccatgacagagagtggaaagcctattaataggctgtttttatttgcaaaaaataatattatgacaacattgaaatttcggtcgcaaagttagacagatgtcaattaactataattatcataacaagtcttttttttatctttttcactcaattacattcttccggatagcctctctggagttttatcactatttttcagtagttttctccattctccgggagtatatccgaagttccttttacagtatctacaaaattgggcatgtgaagaaaaatgtaattcatcagctatattccctatcggtatatcctcatcagctaatttatatttaataatagtgtttatttgtttctgcaaccactcactcgcaggctctctgaactcttttaaaaatttcctgttaaaagtagaaagagaacttccgcataggcgggcaagttcctttactgtcctggcatttctgtaattatcaagcaccttctttttgaattcatgctcattccccaatataggacggaaaaaggaaacttgttccgttttagtataataaaactgtatgttccagaacaactctttcagctttgtttcatgaaaatgaacgcaattggctccatccttcagatagcctattaaaagcttgagaaacatttgtaatctggttctaatttcaagtggatatattgctttttcacccgggaaactcagactgttaagctgtgagaataatatcttttcacaactttggacgatgttgtcaaattgtgcaatgacaacagtcgcttttccccgtgagaatatcctgcatatgcttcccctgctgaaacaaatcatattaccggccaaaatctttgttttttctccgttgcaggatacctccagttctccttccgttacaaaccaaatacaatcagtctcattgggatcttcatccatttctattttacaaaatttgtaatatgaaaatccttcccggatgcattttggataattgtaacagggggtatcccctttcaaatataatattcgcattgtttctgccatttagtaaaaaatataaggttatgttattgcttatctgcgtatttatcttttatatatgttctatatccaatctttttttcatcttatttcatacaaagtcccctttttgagctctatttacgctattttattcttttttccactctctgtcatggagagtggaaactattgcttggcttttaagtagataatttattagtcttttttgcagatggatttaaaaagagtttttgttttgaccctgttcctcggtattttctgtccggccttttgctgcggtgataccctgcattgccggctctactttcccgtgggcagttccacaccggatctttcctaccgggacaacggtgtccgcctggactcgcttctctcgggcatccgttcccggcaggcccattccgtgctgcgccgtatcagtatgcgctcgggatcgtcgcccgagggaaattcagcctcaaacaggcgcctgtccgatgaacggctcgcgtccttgcggggccttatcctggaacgccttcccgtccccgattcggtattcgcatgcacctcttcggggaatgactgggaggggcttgcctcacttgtcaaggcttccgacatgccctaccgcgaggaggccctccgtatccttcgtgatactcccgagtgggtgacccgtaacggagtcgtcgtcgattcccgcaagcggcagctaatgaatctgcgcggtggccgcgtatggcattatatggcagaacatttctttccggaactgcgtaattgttccgtaatcgaatgcgagttcgaaccggtctccaaagggatggaaggggacactgtcgttctgccccgacaggcggaaccaagggataccgtcgtcgtccgtgataccattgaaaggaccgtcgtcatccgcgacacggtacaggcagccgttcccgttgccgatgttcccaaagctttctacatgggactcaagacaaacctgctctacgatgcccttctcgtcccgaatatcggcgtggagctctacctgggcaagggctggacggtcggcggcaactggatgtacgcctggtggaacagcaataagcgccataattactggcgcctctacggcggggagctggacgtacgcaaatacttcggtcgccgcgcggcggaaaaaccgcttacaggacaccatctgggcttttacgggcagttgttcacgtacgatttcgagacaggaggaaaaggctacatgggcggcaagccgggtggctccctctgggaaaaatgcaattacgccgtgggtgtggagtacggttactcgttgcccgtgggccgtcgcctgaatctggatttcgtcatcggcgcgggctactggggcggcgaataccatacatacgttcccgatggcggccagtatgtctggagagagaccaggcggcgtcattggttcgggcccacgaaagcggaggtctcgctcgtgtggcttctgggacgtggcaattataatgacaagaaaggaggcggacaatgaaaaggatgttggaacgtatgaaccatgtattgctggccatcgctgttctggcggtcttgtcattgacctcctgcgagcacaaggatctgtgccatgacagcttgcatgtggtcaacgtgaaggttgtcttcgactggcggaaggctccggatgccgcccccgcgtccatgtcgctctacctgttcccgacccatggcggggaggcattgcgttacgagttcacggaccgtaacggcggtatcatccgcgttcctgtcgggcattacgatgcattttgcctgaacagcgacacggagaacgtcacctatcgcaataccggatcgaaaacgactttcgaggtcaccacccgcacggccgatctgttatcgggcctttccgcactgggtgtgcggtccgccggtgtaccccgtgccagaggtacggaggatgagcgtatcgtgctgcctcccgacatgctgtggagtgaccatgcggagggtatcggattgaatcaggaaacagccgcgccgacgatcacgctttacccggcagtgtcagtctgccgctacacggtcgagatccgtaatgccaaaaacctgaaatacgtctccggggtcggcagctcgatctcgggcctggcgggaggtctgttgcccggtgcgggagccgatgcccttacgggagagcgtgtgacaatccccttcgatgccgttaccggcaaggataaggacggggagaaaaccgtcatcacgggcggtctgctcaccttcggccataaggcgggaaacaaccatacgctgactgtctatgccgttctggccgatggaagcaagtggtattacacctatgacgtgacggatcaaatccactcggctccggacccgcgcaacgtgcatatcgtcctggacgggcttcccctgcccaaaccgatcgtcaacggcggcggtttccaacccgaggtcgaggactggcagaccgtgccgatagatatagagatgtagtctttcccttcgtccttcaagcaaagacgagagaatatatagttcattcatttattaatttttaaattttatttttatgaaaaagcaatttttattcattgccgtggcggctctcgccatggcatcctgttcgaaagacgaacagacagctgtcaaccgtggtgctgcaatcgatttccgtggcgcaatggcaacccgcgccacagaaacgacaacggctaacctcgatgacattttcgtgacggcccttgacaagaactttgccaatttctttactgatgagcagttcgccaaagacgtggattacttttttaaatccactacctcctattattggccgaacgacgacagcgaactcaaattcttcgcctacgcgccttcgagcagtgatctgggcggtaccgtgacaatcaccaatgcaaccaagacgctcgccgatttttctcctaaaacgactatcgccgaccagaaggactttgtgtcctgccaagctaccggtaaaaagtcggtcaacgagtcagccggtgttgccttgactttcaaacatcaactttcccagatcgagatcaaggccaagaacgaccaggatgcttaccgttacaaggtggtggccgtgcgtatcggacagccggtatcgaaggggacattcgatttcggtactgaaagctggaacttggaaacggataaggtcaactatacagtgcctgatttcggtgaaataacgctgaacggaacgcccgaatcgcttatgggaatgggaggcagcgccatgctgatcccgcagcagcttacagcatgggatgctgccggggataagcccaatgcgggctttggtgcttacctggccgtaaaactccagataaccaccaaagccggtgcccgtgtctatccggctgaaattgtcggtgactacgactgggctgccgtgcctatcaacacgaattgggaggccggcaagaaatacgtttacacactcgatttcacaagcggtgccggcaaggttgatcccgaaaaagaagatccttctgacccgaccgatccgttcaagcctggcgatgacatcctgggaaataacgccatcaagtttacggttcaggtaacagagtgggtagaagaaacgaaggatgttgacatgtaaagaatcggacggccgcatggcggccggatgaaacaggccgggcggagttggaccggtatccgatatcttcatcggcatcacggtgtccttgccttgaagattcgtcggggagccgaaaccggggtgaaagccggtttccggctctgtcccttcccggtcacaaataagcgtgcaagggcctcccgtgcacgtgaaaaacaagaaacgatgatataaatagcacgaatatggaaatgaacaagaatttatgccggaggctcggaaacttgagcctgccggtattgctttcggtcgtcctgctcgcctcgtgccgggatgagattgagacgggcgcgtacacgggaccctatatccgcttttcggtatccgaggggtcggagtggcatagcacgcgggcggcgggcggcccggcagaaaaggcggtcccacgggattccgtgcagcccctgcacggcggagatggcaatactcccctttacctgcacacgctttacaccgacagcatcgcttccccctcttcggacagccgaccggacacggccgtccttacccgtgccacgcccgtaaaaacggagactctctacgaatcgttcggcatatcggcatcggcttatacgggttcctggagtgagacctcgtaccggccggattacatgtacgatgtcgaggtcacgaaagcatcgaactggaccacctcctatcgttggccggctacggaacacctaagcgtcttcgcttacgcgccctaccacggggaagggatcgtcctttcggacaaggcgaagccgggaagcccgacaatcacctacacggtcccggcagacgtcgccaagcagaaagaccttctttttgcaaatccgacttattctgctccgggaggtattctgaaaatactttataatgtgatgcctcttactttcaaccatgccctgacggccgtcaagttcgtgtgcggggatgacatgcagggaggtaccgtaaagagcgtcagtctgaaaaatgtatattccaaggggaatttaacctttgcttacagcattataacacaaagttgctggagcgatgtagatactcccgccgatttctcgcagacattgggcaaaaccactacgggaaccccggacgaggcccttactaccgatgcgcagaccttcatgatgattccgcagacgcttcccgacggcgcacaaattgaagtcgtattcaccgacaaatccaacgtcgatcacacgctgaccgctgacatcaaaggcacagtctggcctattggaaagactgtcacttataaaatctccagcagctccataaactggacatacgagcttagcgtcaacatgccaggggacttcacctatagcggcggtacacaacaatacagtgtcacaagctacaagcataactccagaggggataagcaacccgcccaatggaaggcacagttttcggagtacggcggaccatggacagataccaaacccgcctggctgaccggtttcaccacagccggagccggtggagagactccacaatcatacaatgcaactgtcggcgcacagatcggtacgagtagtgacccccatgcgcaaaagttaagggataacccatcacacggtggtgtaatttatcaccataacctcgccaaccagactgatggtggttcaacggttcagaacaccgccaactgctatgttgtcagtgctccgggatactactgtttccctttagtatatggaaatgccatcaaaaatggtacgaccaacacttctgcatatacctccaataaaacaggaagtgatattctgacacctttcatcaaccatacgggtaatccaatcaccagcccttacataaaagagaatgccggttgtgttcctgccaaggccgaattgttatggcaggacgcgccgggtttgatttccaatgtacaatacaataattcccaaatgcaactattcgttaatcccgagaattacatatccttccaagtgtatgctcggactatccggcagggtaatgccgtcatcgccatcaaggatgccggcgacaacgtcctctggtcctggcatatctgggtgaccgatgaaaatatcggccaaaccatcgaggtaaccaatcaccaaagccaaaaatataaatttatgcccgttaatctcggctggtgcgatggtcgtaccaaaacttatgcagagcgtagttgcaaggtgaaattcactgccggagacgcgagcaaggaagtgattatcaaacaagtttcggcttcaatcacaacaggtggcaatcatccttattatgagtggggccgtaaagatccgttcccaccttcgaacggattggtcaataccaataaaacctggtacgacaaagacggcaatgctcacacggaaagtcttcaaacggagaacctttctaccggcgtcgcttgtatcatgaattatattctcaaaccggatgtgatgcagaatcaatcttccggcgataatacatatgcaaatctatggagtgccgataacaatgtttatactgccaatgacgaaaatgtcataaaaacgatttatgatccctctcctgtgggcttcaaacttccccccagtaatgcttttacgggattcacaacaaccggggagtatgtaagtacactttctcaaatcaacggagagtgggacagctccttgaagggatggaacttttacactgactcctcaaaaaataaaaccatcttcttccctgcgtcggggtatcgctactattccaatggcggggcgggcagcgttggcagctacggcttctgttggtcggcggttccgggcagccaggtctccggtcgcccgctgtacttccactcgtcgcgcgtgtacccgttgaactacgtcaatcgggcgttcgggtttggggtgcgttcttcccaagaatagggagcgtagcgaccgtatccgtttcattggattattttccctacggctttaaggccgtagggatagtaccggcgaagccggtcgatttttatagatattaaaattaaataattatgaccagcaaggattttatagaagctgaagcaggtaataacggaagtatcattctttatcgtgaggggcttttctggaaagcttatgaaaagtctgcttacgctgtctgtacgcagatcaagcctttgaaggctataaaaagaaggttaaagtcactcggtggcggtgagatagtttcagtgggatttccatgtaagcatgaacaaaagtatataggttctttggagcatatggagactatgcctgaccgtcttgtgttgcgaacgctaaaacctatagacggacagaggtttgaagaatggaaacaggaactttcatcggagcattcagttggagggaggagagatgcgtgtgtgcagaatctgtcacggagtaatattccgcatggagagttaatcatgcgaatccggatgttcaatctggcggaaagtactccgatggattgtatgttatttgtaaatgagttgaaaaagatgctctaatatacaatgaatgagaagtggcagtttatgataatttgcctgtgtataaggctgcatatgatttgttaaggagtgtgtatgagaagacgggaaagattccccgtgatgtgaaatatacactggtggaggtgttgaaaaaggatctgaccgagattatggtaatgatatacagggctaatgctacgactggaaaacttccgtatattgaacgggcaagagatctggttgtaggagtcaaggtccgtttaagactgttgcaagatatgcggcatatcagtgtgaagcagtatgcggcgtttgcccaacaggtggagttgctgtcgaagcaattgtcggcttggcatgattatgcacggagacaggacgaaaagagtcaagaaaaaatataaacaagaaaagatataaataaaaaggattcctttgcctacacaaaacaggataaggccagcatttcgtatagccaagacttgcgagagagtgccagataaattcagtaacccactgtccgtgtaaaaacggtcatggcggatagatgtatccgaagccatgttgcgggcagtaatggacagttttatatcggggttccgaaaggtcctccgatatatacaataagtggttatatttccctgcgtcggggtatcgcaactattccaatggcggggcgaacaacgttggcagctacggctactgttggtcggcggttccgaacaaccagaacaacggtcgcaacctgaacttcaactcgtcgaacgtgaacccgttgaacaacaacaatcgggcgtacgggtttggggtgcgttcttcccaagaatttatccttgtacgaggcagggaatcctttgaatgtaaattacagaaatggctgaatgttataagagacaggatttgcttacggatctttttcaggcctattacgaggcgaggaagaagaaaagaaatactgcgagccagcttgcgtttgagattgatctggaacataatcttatggagttgtatgaacagataagggataggaactacactccttcacctggggtatgtttcgtggttaacaggccagtgaagcgagaaatttttgcctcggatttcagggacagggtagtgcatcatctgttgtataattatatttctcctatgtttgagggcagaatgatttttgacagttattcatgtcgccgaggaaaggggacaagtcagggaatagcacgcctggaacaccacatacgcagttgtacgcaaaattatcgttatagtgcctatatattaaaactggacttaagggggtatttcatgagtatcaggaaggatcgtctgtacgatcttatctgcaagggactggaacgatatagaagaagccggaaacaaaaagaatgcccggatatggaactgatagatttcctgctaagacagattatattcagaaatccccagcgggattgccggatacggggtagcgcggaagattgggaaggacttccacccacgaaaagtttgttcaattctccggaaggtgtgggacttcccataggagatttgacatcccagctgttcagtaacatctatttgggggagttggatggatatgtgaagcgtgttttacgctgtaaacattacgggcgttatgtggatgatttttttattgtccatccaagcaaacgctatctaaaggaactgattccatggatacgggaattcttgaaggaagaattggagttggagttgcatccggataaaatcgaattgcagcattacagtcgtggtgtggcttttctgggagcgtatgtgagaccgtacaggaaatatccgtcaaaacgtaccgcaggattttttcgggaagcggtacacaggctggaaaaagagagttccaaaggaaaacccgctccggaaagactgcgaaagatgttggctgtgctaaactcctaccaggggcatttgaagcatttcagatcatacgctctgctggataggttcttgcgtaattcacctttgaaagaatatttctattttacgggaggttatagaaaagccggtattaggagtcgttttctgatccctataaaagatacgtacgggagaggaaaagaacccgaaacttttcctgaaaccggggggcggattatggataatagcgtacatcgtgaagatagcgggggcaggaatagtaaataagcaccagtatatgtatgaaatgtatgcctatgaaactgaaagtacgaatatttgagggaaaatctcccgaactttatctggccgtagggcactttgtacttagtcctgcatgtctgcgggagaataacaactacccttataaatcctcccggatgtttacctggcatgttctctaccatgaagaccaggtagtggctttcatgcctgttgagagaaaactcgatggtggttataaaattgataattattatgccactcccgatagggagagggggaaccagttgctgaagctgttgaaaagcgtgatcaaggagtcgggcgatgagacttcccctttgcgggcgaccgttcagaaacgggatgtcggaattttcaaatacatgaatttcatcacgatccgggaaaccaagttatatgttatgatggaattggtacgtatgggttccgacagtgggaaacaggatggctgaaagagaatgggaggaactcggatgaatgtatatcaggcgttgcgggagaggatcagaagaatcttcggcgagtatgattatgtgtacctttctttttcggggggtaaggacagcggtgtgctgctgaatgcctgtgtggagcatatcaggcaatatggaggtcggatgggagtattccatatggattacgaagtgcagtattccctgaccacggagtatgtggatgagatgctgtcttcgaaccgggatattctggatgtttaccgctgttgcgtgcctttcaaggtcggttcggctgcatccatgtaccagagattctggcggccctgggacccttgtgtccgttgggtcagggagatgcctgtggaatacctgggtacggaagcatttgatttttatactccgcagatgtgggattacgagttccaggaatgtttttccttttggctccgcaagcaacttggagtgcaaaaagtggcatgtctggttggaatacgtacccaggaaagctttaaccgttggagaacgatctatcgtagcactccgggcccttcagccgactggatatgtcctgtcgatgagggcatagacaacgtgtatccgttgtatgactggcatactacggatatatggactgccaatggccgtttccgttggaaatacaacaggttgtatgacctctattatcaggtgggtgttcctctgaacagccagcgtgttgcgagcccgttcatttcccaggccatcccgtcgctgcatctgtacagggtgatcgagccggagatgtggggcaagatgctgggacgtgtgaacggtgttaattttgccgggggttacggtaactctgtagcgatgggatggcggggtgtcaggctgcctgagggaatgacctggaaaaaatatctttttttccttctggacacccttcctgaggatgccaggaacaactatctggataaactggaggtaagcgtgcggttctggcgggagaagggcggctgtctggcaaaagaaacgatcatgaaactcaagaggttgaatatccctttcgaacttggcgggacatcgggatacaggacgcacaagctcccggtcaggatggaataccttgatgacatagacctgcctgaattccgtgaattgccctcgtacaagcggatgtgcatctgtatcctgaaaaacgaccactgttgcaagtacatgggcttttcaccaaataaacaggaacaggaaagaagacggaagatgatggatgaatatagatcttattttaatgaatgaaaagatggacaatgaatttaccagtcccgtgtatggcgtcaaggctgtaccggtggaaaggatcagggcgaattcctataatcccaacgtgacggcccctcctgagatgcggcttttggaactctcgatttgggaggatgggtacacgatgccgtgcgtgtgttattacattgagaaagaggatgtgtacgagcttgtggacggctatcacaggtataaggtcatgatgacctcgcccagaatatacaagcgggagaacggactgttacccgttaccgtcatccgtaaggatctggccgagcgtatggcctctaccatccgccataaccgtgcccgtggaatgcataagatcgagcttatgacacggcttgtcggggaacttacgaggtcgggcatgtcggattcgtggatacgcaggaacctgggtatggacaaggatgagttgctgcgcctgaagcagatatcgggactggcggagctttttgcggataaggaattccgtaaggccgtagaataggatatttggcataaaaccgaaaattcgtatgctcggagtattcgggaagtaagaaaaaatgtaaaaatattataaaatgtgcaagatggagataacagatctgatcaagggaatggaaagtgcaaatgtgtcggatatttacatttttcttcacgaggacggccctgtggcttttgacgcctctgccgcccatcttctgtgttactttcctgaaatggagatggaaagtgtgttttgtagtgacagcaaacgtcacagaattatacagggatttgcattggaaccggtgctggaacgactggcgcaatacccgtgtctggttgatgacgattgtatcagaataatgtgtgtgctgtgaatgataaggcacggtatgaagtaaacgggtatgggcgggaatggcggagcctgatcttctggaactgttcagaaagcatgcgcaggatgggcagaaagagatggtcagcctgttttgcaatgatgtgagaagactctcccggacgaagaagataaagaggctactcgtgttgggaaggtacgcagggaactctgaactttgcgggcatgtgctccgtgtgctggagatgctgccggaactccccggcatggcttgtcctgcatacaggggcgttctggtattgctcttcctttcacgggacagggatgttttgtgcaggttgcgggagaatgtcgtcctgccatgccgcaagaggggacgtacggaggaaatgctttggctttgtgagattttgtatgctataggcccatctgtttccctgcatgatatttgcagggaggtttgcttgtacttctatcaggaacggaggaaacaactccggggatattccacttgtgtcagtgaactggactttcagttcgcagaaaggcggttgaggatattgtccgtcgccgtatttcgtctgaaagttattttttacagccccggcgtgtattccgtcggtacactctccctgctgtgccgtatgagttattcggccttcagaaacaggtttctgtctgtttacgggttgcccccgggacgttggctaaggaatcggcgaataaaacgcatatgtctggatataaaatataatcatggactttcactgggagaaatatcggagaggaacggattttcatcagcaagccgtctgtgtgaattctgtaaaagaaacatgggatgcactccggggaggctgaagcaggcactggctcaccggtggcggagcaaataaaaattcatcaggcttgatgtagagcttatttcaaataaaaagcgtaacggctatcagtgctcgtttcgctatcttgccggtgtttaattaaaatcccgaacagcatggaactgtttacttttatcccttatttcctgttactggagcgagaagagagtgacaggaatacactggcaaacgccaacaccgagttcatccgtgaggtctatgagctgcaacgtgtggaaaaggatgttacgctcgtctttttccagctgcaatatctaagttgcaaactggtcattctgcgtgagcattaccgcacagcacaaaaagagcacttgccctgctatgcctatatcattggtacgctggagtacctgaaaggtctgctggacagatgcaggttcattcataagtccggttccgccattgctccggcaggtctgccgactacagagggtgatccccccgtctgctggacggcagaggtcatctgcctgatggaactgctgtatgcctgccacgagctgaagatgttcaacggcggtgaggtgacactcgggcgtgtggtggaatacgtctgtcatgtgctgggggtgaacgtgaagaatgcttcgagctactacgcgcggatgcggcggcgtaaggcgggagacagaacctacttcattgaccgcctgcgtgaagttctgctcaaacggatggaagacgatgacgaggggcacaggagacgcaaccgatgaaatgcggaccctttcacacacggttctccacgtgtgtgaaggccttgcatttacggttatttgttcagttccagaagatgtctgaggttgggatctgcggcgatgcgctccagctcgtcggccacgatccgtctgacatcctccttgatccggttgtagttttcctgtaccatttccttcatgtgattcaccccttcatcgtccacgaagccggtgataacgggtatcttctgatatgccttttcctcttcggctattttttgggcatcgacgacaatctcgcagtggaagattttctgctcaatcctctccccgaagttgtcggctacggagccgacgaacatcccctgtgtcagtccgctgatcttgctgggtggaatgaggctgtccatttgggtggatatggaggtggaaacgtcctgtcggttgatggagatggagtggcgtttctgaagtatcttgccgaacctctcgctgagggttttggccgtttcccctacgacctgtcctgaaaatatgttgcctaccgtgttgatgatcaccttcgcctccttgtcggtatagtcacggataagctggctgaaatcctgaaagccgagcagcacagcgaccttgttgctgcgtgcggtggctatcaggttgtccagtcccttgatgaagatggtgggtagctcgtcgatgatgatggaactcttcaacctgcccttcttgttgacaatctttacaatacggctgttgtacagtccgagcgcagcaccgtagatcgcctgccggtcgggattgttgcctatgcagaggattttcggctcgtcgggattgttgatgtccaaagagaactcgtcggcggacatcacccaatagagtgccggcgagatcatgcgggacaggggaatcttggcactggcgatctggcccatgagctggtcggcagctcccgccagccacgcatcgaggaaggggctgaggtagttctccagttcgggataggaggacatgatgggaaaaatctgctcgtagggcttgttaaggaactcgacggcatgggggaaggtacaatacctgccgtccttatacacccgcaggaaccagatgatggcggcaaagagaatggtgggcgactcgacgaagaaatcgccctgcttcgccgcccacgaccggttgaggttgagcatgatactgtatgaactctcgtaagcatcggagatgtcggtcatgaacttcggattgaggggattgcagcggtggctgcgtgagggatcgtcgaagtttatgacatagaacttcggtggcactttatacccctccaaatgaccgatcaggtggttgtaagcaatggtggagaggtcgggaaacttgaaatcgtagatataggcggcatagcctttctctatctgctgtttgatgtaggagttcaccaccgcaaaggacttgcccgaaccgggcgttcccagcacgatggaggcacggaaagggttcacgacattgatccatccgtcgttccacttcttgccataatagaaccgtgtcggcagatttacggaatattcattttcgataagccttgtttcctgcatgaaactttcgttctcgttgttgaacacatcgtccatgagattctgtttgagcaggcgggagatccatacaccggcagcgagcaggcagaggtagccgacggcaagagtgaatatataaaaggcggtgcgtgccaataacggtacgggcaggcagagcagccaccagttgaaaaagaagaggacgacacctgcgcaaagggctgtccagatatgcacccatttgattttttcctcctttacacccttcgtgcccagacacgagagggcaaggaaggtaacggagaaaagctttgtccaaaggatggagccgaacaatccggtcgtgcgctggaagttcagcagaatcctgtccaccactccgatattgacgttccattcccggatggacggatagcagaaccaatagatattgacaactacgaataatacgctgagggcacgcataaagtccatgactttcgccagtcccctgagatcatcttcttgtgacataatactgaatttaaaaaagttatcgtcttgataattatgtaatacgggtcagtcctgacgaccgtaacgccggcggcatttcttcttgtcgggcttcaggagcctgggataccgggggacatagttcagctccggctccatatcggaaagcaaccctcccggaattttttccccgtttccggaagccacagcggacggaacgggcggcagaagtggcgacagggaatttggcggctgttcctgaaagtgtccgttgagcatgttcgccgagaattccttgcccagacgtgagccgttaagtacggtgcggctgcggtggtctataaaggtaacgccgtaaatcctgccggtttcgttgcggcggagaaccaagtctatctgttctttcgccaggcggtcacggaaatcccgttcgtccacggactggcgcaaagcctcggccactaacggtcgaagccgttcacggcacggatcggacttgatctttgcagcggattcctgcatcttcttatccagctgctgtgcaccggtcattctgcccagccgggaggactttatgggagtggccgccgtttcgccgttgccgtccaaagcggtatagagtatgccgtggtaggtgcgtccaccagtttcccccttcacttcttccacacctatattatacagggaaagcagggcacggagttcgcccattgtgcggaaacggtaaagttggatcaggggtttgaccgtacaggcgatctgccgtttgatgtcccctttggcaacatctaccggcttcagctgccactcttcgcctttcttctgaccttccgccggatgcagtccgtatttctgttccagaagttcggtaatctccttgctgcggcggtattcgaacttgtcggaaaccttccttccctcactgtcgacacgcagggaaacgatgtggatatgatgccggccgatgtcctcgtgcttgaagacaagatagggctggttaccgtaaccgagccgctgcatgtattccctgccgatttccgccagctggctgtcggtcagcacgtcgtcgggatgcggattgagggagatgtgtatgaccggcttctcggtgcggtaatggttcggcatccattcgagaaactgccgcatggattcatccggacggaagcgcccgtcttcgggatagcggaggagatgtgccgaaaggacttttgccccgccttcatcgaccttgttctgattgtaggccagtgcgccgtacaagttcttacccacgctgatcctggctaccatgtgaggcgagtttctgggaaagttcgacaatccggcggttcagctctacgagttcaagggtgagcttttcaagtctgtagagcagtgccaatgctttcttttcagtgaaatggatgtgcaattccttgactgcctgattgtaattcactcctatggcacggaactgccggaacagttccgtgagcttgactacatactccattgtggcacggtctgtccggatcaccctgaactcttcgttgaagatccgtgctgcgatgaacttggatttggacaacagaccggactgctcaaacatggtgagaaaccgtgcatggccggcttcgtccagattgaccgtctcacggcggatggccgggttcggcttgggtaacctgcccccttttccccgtgtgcggggacgctttttctcgttgttcatatatacgttttttatgtggtacaattccaccgggtggaattgcctccgtcagctccccctcccacaatttgcgacttcggagcaaattgcagcccccctgcaagggcaagcgttttttgctgcaaaacggagtggtgctgcaaaaaacacagcttgctatgttctggcgaacataaatctttcctctttggagaggaaagagcgctttcggggaaagcggggattagtgaccgacggaaggcaaactgcccattcccggttggatggcgcaaagttaggaagtggtataatcagttgtatatcactaacattagccacattatgccaaatggaagccacttgtgcacacgggtggaacaagaggaaaaacgggtggccgatgatggctgaatcagcggttgaggatgtgcctgaatgggatgcgtaatgacggactgaatgaccaaccggtcagataaccaaccagacggtcagccgttgcaacgttggtgcggtcggctggctgactagccaaccaagcggataaaaggctgtctgtccggcgggatgattaggcaaccgattatcttcctgtttgtccgacaggctatgcagtccgccggattgtgtcatgtatggtcagaccgtcggtcggccaatcagacggacaatacttcggtcggttggctgttcagtcagccattccacgtcaggagccggccacttgaaccccgccgttcccaaaccatgaatttcccttctttttccttctttatttgcggcgttgattcaaaagtatcatttgtaaacaaactgcatcatggaaaaagaaacactctttatcgccttttccacgcaaaaaggcggagcgggaaaaacaacgctgaccgtgctggtggcaagttacctgcactatgtgaaagggatgaatgtggcggtggtggattgcgactacccgcaacacagcattgccgagatgagaaaacgtgacctgaaaacggtcatggaggacgagcattacaagctgatggcgtacagacaactgcaacggataaggaagaaagcctatccggtagcggagagtacggctgaggacgctgtcacgaaagcggacgaactgctggaaaagatgccggaaacagacatcgtgttcttcgacctgccgggcacggtaaacagtacaggcgtgttgaacacgctggcgaacatggactatgtcttttcccccattgccgccgacagggtggtgatggaaagcacactccgctttgcgagccggctgaatgacacgctgatcgctacgggcaagacgaatatcaaagggctgtacctgctgtggaacatggtggacggccgggagaaatcagaactgtacaaggtgtatgaacaggtgatcggcgagctgggactgaaagtgctgaataccttcctgccggacagcaaacggttccgccgtgagctgacaggggaacatagggcattgttccgttccacgctgttccccgcagacggtacgctggtcaaaggcagcaacctgaaagagattacggaagaactgttgtccattatcaggaagtaggctatgggaaacgaacggaaaaaaataaacctgacggacattgatgagaattccatagtcgcctcgttcaaggaaggccggccggcggacgggcaggcgcaagcagccgggaacaagggacagtccggtgaagagagcggatatgtccgtctgttcatccacgagtcaccggtctgtgcacggcttggcaagacaatctatcttcgtaaggagtttcatgaacggattcagaggatcgtccagacaatcgggaacaacgagatgtccattttcagctatgtggacaatgtgctggaacagcactttgccgcctatcaggacgagatcacgaaggaatacagaaaacgaagtaccgaactgttttaacccccggaaaccatgtcagcaatcttattcttacttatcggtagctatctgttatggatagccgcctacctcttccacgagcggaacagtcggaggaagagagcggaaaaagccgggcagatccttacccggattacggtggacgtgagcgagattttaggcaaaagtacattttcccttagccactccacgccacaaacgcccgaaaaaattgaaaacgaaaaatctgtaagcgaagcaggtatttttgtaccggagaaggaaaagttcccgaaaatagtttctgccgaggaactggacaagctgtttgccgaagggagtccgctgccagaagatcttgaactgatggaagatatggatgtcccgttggagttccggggagaaccggcggataacaatcttcggatagacgatgacgagcaggacagatgcctgccgggatgcacgccgcaagccacgggcatccgcttcgaggacatgggactggcggtgcgtgtggcggtcaacggtgaagcggccagtgaagaggaaaggcttcaggccggaaagacactggcggaacttcgcaacaccccgatgttcgaacagctgacctccggcgatgcggaacgtgaggaacggatcggctcgctgatagaactgcaccttgcggcataccgcaagcgtaaacagccggacagcgaaccggcggcagaaaccataccggacactttctccataagcgatattgtctaacgaataaagtaaaacgtacatgaaaaaaagagattacggatagctgacggttcattcttaccagtagaaatccagacaaatttaattaacaaccggatacggcggactcttccctccgtcgtgtccctcattcaaatccatttattttatgaacacgaaacaacttgtattagtggcggtcatgctaatcgccacgggctcgctccatgcgcagggaaacggctcggccggtatcgcagaggcgacgaaaatggtaacaagctactttgatccgggaacgaagctgtgctacgcaatcggagccgtgatcggcttggtcggcgggattaaagtgtacaataagttcagttccggcgatccggacgtaagcaaggtggcatcctcctggttcggtgcgtgcatctttctgattgtcgccgccactatcctgcgttcgttcttcctctaaaggacagattcgcctatatataatgtatatggactatgaactgaacaaggggatcggcgagagtgcggagttcaagggactcaaggcgcaatacctttttattttcgccggcgggctgctggctctgttcgtgctgtttgtcattctctatatggccggtgtctgccaatggctctgcatcgctttcggtgtaacctccgcatccgcactggtctggctgacattccacttgaacggcaagttcggagaacacggactgatgaagctgctggccagaaaacagcacccccgctacctgatcaaccggatcagtccccgaaaattattcacgattaaaaagaagaatgtatgcggaacacactaaaggccgccacattggaaagcaagttcccgcttctcgccgtcgaagcggactgtatcatctccaaagatgcggacatcaccgccgtctttgaggtggagctgcccgaactcttcacggtaacggcagctgaatacgaggctatccatgcggcatgggcaaaggcaatcaaggtattgcccaattatacggtggtacataaacaggactggtttatccgggaggattaccgcagccagacggacaaggaaaatctaagtttcctttcccggagctacgagatgcacttcaacgaacgtcctttcctgaaccacaaatgctatctgtacctgaccaagacgacgaaagaacgcatgaggatgcagagcagcttctcttcgctgtgcaggggattcatcatccccaaggagatggacaaggataccaccgcccattttctggatacggtaggacaattcgcccgtatcgtgaacgatacagggctggtacacctaagacggctcgtcggtgatgagattaccggcacggaggataaggctggactggtggagaaatatttctgtctgtcaatggaaaataccactgcgctggaagacatcgaactcggagatgacggcctgcgtgtcggcgacaagcacgtttcggtacatacgctatcggaactggatgcgttgcccaacaaggtgggtacggactgccggtatgaaaggctgtcaacggacaaaagcgactgcaagctgtcattcgccagtccggtaggcctgctgctctcgtgcaaccacctgtacaaccagtatatctttctggatgacagcggcgagaacctgcaacgttttgaaaagagcgcacgcaacatgcagtcgctctcgaagtactcacggagcaaccagatcaacaaggagtggattgacctgtacctgaatgacgcacactcgttcgggcttacctcggtacgtgcccactgcaacgtcatcgcatggacggacaacccgatggaggtgaagaacatgcgcaatgacgtgggcagtcagatcgccatgatggagtgcaagccacgccataatacggtggacgccgccacgctgtactgggcggcaatgccgggaaacggcgctgacttcccggcagaggagagcttctatacgttcatcgaacaggccctctgcttctgggtggaagaaacgaactaccgcagctccgtttcacctttcggactgaagatgtcagaccgtatcagcggaaaaccgctgcacgtggacatctccgacctgccgatgaaacgtggcgtaaccacgaaccgaaataaattcgtattgggcggctccggtagcggcaagtcattcttcatgaatcatttggcgaggcagtattatgaacagggcacacacgtggtattgatcgacacggggaacagctatcagggactttgctcgctgatacaccagaagaccggcggcaaggacggcatctatttcacttatacggacgaaaacccgatagtgttcaacccttttttcacggatgataaggttttcgacattgagaaacgagagagtatcaagacactgatcctcacactctggaaaaaggacaacgaaccggcgacacgttcggaagaagtggcgctgtccaatgcggtggccctgtatatcaggcgcatcaaggaggatgaaagcatcgttccctcgttcaacaccttctacgagttcgtgaaaacggactaccggaagatactggaagagaagggagtccgggaaaaggatttcgaccttgcgggtttcctgaacgtgctggagccttattaccgtggcggagaatatgatttcctgcttaactccgacaagcagctcgacctgctcggcaaacggtttatcgtattcgaaatcgatcagatcaaagaccaccccattctttttccggtaacgactatcatcatcatggagttgtttatcaacaagatgcgccgtctgaaaggggtgcgcaagatgatcatcatagaggaagcgtggaaggctatcgccaaggaagggatggcggactacatccgctatcttttcaagactgtccgcaaattttacggagaggcagttgtggtgacgcaggaagtcgatgacatcatttcctcgcctatcgtaaaggagtccatagtgaacaacagcgactgcaagattctgcttgaccagaggaagtaccttaacaagttctcgcagatacagtccctgctgggactgacggacaaggaaaaggcgcagattctgtcggtgaacatgtccaatgacccgaaacgcaaatacaaggaagtctggttcggattggggggcgtacagtcaacggtgtacgccacggaggtatcgcccgaagaatatctggtgcgcccgtaaagggaatttgacgaatgtcgctttggcaagcgactgggcaagtgtttaaaatgcccattaacaaccgctaaccggaggggaaaaccccacaagggaacatagcacgttggtaaagccataagtcagccaactgtcaggctgcgaccgaatggcaagttaaaatgatagatatgaggataaagcctgcattggttgaacgatagtccgagcagtcgtatccttgggcaatgacggaagacagttgaataattcttcggaattataccgttatgttgcggtactacactgatgacacgtagcaggagtagcataaacttaccgcaaggcaactaccataagtagtaaaggacgaaagtcgtatccgacaatctatcgagccaaatagtcgtcaaatttctaaacggggattgcctaaaccggaaagccagttgtagggctatggggtctgcccctgaatatccggcatggcaacggagcttccatagtagtctgagcagggtaacgccctgtacatggcgaaggggagcagctaattaagtttaacaatttaaaggaagatgtgagagacatgagaaatccagaaaatgtgttgaacagtctgagtaaacacagcggtaacttgaactataagtttgagcggctgtatagagtgctgtttaacgaggaaatgttttatgtagcctatcagaatatttacagcaagacaggcaacatgacggcaggagccgatggtaaaaccattgacggaatgagtattgaccgagttgaacaactgattggcagtcttaaaaatgagacttatcagcctaatccgtccaaaaggacgtacatacctaagaaaaacgggaaaaaacgtccgcttggcataccctcttttgatgataagctggtacaggaagtagtcagaatgatacttgaagcaatctatgaaggtagttttgaacatacttcacatgggtttcgtcccaaacgaagttgtcatactgctcttatagatatacaaaagacattcactgccgtgaaatggtttattgaaggcgatattaaaggattcttcgacaatatcaatcatgacgtactgattaatattcttcgggaacgtatcgccgacgagagatttttgcggcttatcagaaaattcctgaatgcaggatatgtggaagactgggtatttcatagaacgtacagtggaactccgcaaggcgggattatcagcccaatactggctaacatctaccttgacaagttcgacaagtacatcaaggaatacatcaatcggttcaataaaggggtaacaagaaaaggcgacgctcgatacaagctctacgaacagcgaagataccgactggcaaagaaactaaagaatgagaaagatgtaaaggtaaggaaacagatgaccgccgaaattaagcggctacgagaagaacggaacaactatccggcacgtaatgaaatggacagcagtatcaaacggttaaaatacgtgagatacgcagatgactttctgattggaattaccggtaatcttgaagactgcaaaacagtaaaagaggatattaagaattatttgaatgaagctcttaaactggaactgtcagacgaaaagacactgataaccaatgcgcagaaaccagcgaaatttctcggatatgacgtatttatacgtaggtgtaacgatttacgtaaggataagtacggtaaaacggttcgtgcattcggacacaagcctgtattgtacctgaattttgaaacgatgcggaagaaactctttgattataaagccgcaagaatcgcggtcgtcaatggcaaagaggtttggaaatccatcgtcagaacgtacatgctgaacttggatgacttggaaatagtcagtcagttcaatgccgaaatccgagggttctataattactactcaatagccaataacagctatgtcatcaattctttctatcacattatgtcatacagcatgtataaggtatttgcgaacaaatacaaatcatctgtaaagaaaatacttctgaaatataaaaagaacaaggttttccaagtggcatatgaaaatagcaagggtaagacactttaccaatcattttatcatgatggtttcaaacgcaaaaaggttgcagggaatatttactgtgacactattccacggacagtttccataacaggtggacgtaacagccttatggaaaggctgaagctccaagtttgcgaattatgcggtgctaccgataaactcgaaatgcatcacgttcgcaaacttaaagacctgaaaggtaaatccgactgggaaaagaaaatgatagctcgaagacgaaaaactttggctgtctgctcaaagtgtcatgcaaaaatagaccccgaccgaagaatcagactgaattaattagtggagagccggatacagggagacttgtaagtccggttcggaggcgagtactcggaaacctaccatagaaatatgacaaggcgctgggtgcttagcctactgctacacgaccgaagagagcgagaaggtggaagtggaacaactggcgaaacagctggacggcaatatcgaactggctatccgaaggcttgcggaaaagaaacggaatcaaagcaatgaaataccgtaaatgcctatggagtatgaaaccttgtttccgctctactggatatgcggggagtggaaaagcaaccgcaagtcgccgcccgttaccgtattccgtgacggtggcgcatacaagattgccctgacctaccaccttgatgcggtggtggtaggcacgatccaccaaagcggcggcatcatctgggcagacctgctggggagggtgcagctcgcttatgaccgggaggaagaccggctggtgctggctaccgaagggatctatgtacgtgcggatgactcatagggaaaatggagaaccccggttctcccgtaaatgacagtaacaactatccgatttattcaacattaaaattttaaaagacatgaaacgaattatggctgtctgcttggccgggcttctttgcccgattatggcagtaaaggcacaatgggtgacgttcgatccctcgaactttgcacaaagcatcgtgaatacaacccgcaatgtggtgcagaccacgacgacggcagaaaatatggtgaagaattttcaggaaacagtcaagatctacgaacaggggaagcgttattacgacgcattgaaagcggtcaacaatctggttaaggatgcccgcaaggtacagcagaccgttcttctggtcggtgaaatatcggacatctatgtaaactctttccagaaaatgctgacggacgggaactatacgccggacgagctttcggcaatcgcttccggatatgcgaagatgctggaagagagcagcggtatgctgaacgagatgaagacggtcgtaacctccaccagcctttccatgacggataaggagcgcatggacgtgatcgaccgtgtgtaccgtgacgtaagaaaccaacgcaatctggtcaggtattacacgaaccggaacatcggcatctcttacctgcgtgcaaaaaagaagaacgatacccgaagggtgctggacttgtacggaacggacaatcaaaaatactggtgacatgacgggcgaggaaactttcagcaaccttcacgaagtgttgcgcaacctttatgacgagatgatgcctctctgttcggacatcacgggtgtggctaccggagtggctgcactgggtgcactgttctatgtggcctcacgggtgtggcaggctctttcgagagccgagccgattgacatttacccgctcttcagacctttttgtctgggggcgtgcatcatgttcttccccacattcgttctgggaactctcaacggcatcatgagtccggtggtcaccggctgccacagtatcatggaaggccagacactgaacatacgggagtattccgagaagcggcagaaactggaatacgaggcgatgacgagaaatccggaaacggcgtatctggtcgataacgaggaatatgaacgccagatcgaagatctgggatggtcgccttcggatttgaaggccatggcgggcatggcggcggaacgcctcaaataccaggccaggcagagcgtgagcaatttcttccgcagctttctggaactgctgttccagtcggtttcgctggtactggacacgctgagaaccttcttcctgatcgtattgagcattctgggacctctgtcattcgccatatcggtgtacgacggcttccacaatacgatgatccaatggatttgccagtatatcagcatctatctgtggctgcccatatccgacctgttcagctccgtgctggcaaggattcaggtgctgatgatcgagaaggacatcgctgcactgagcgatcccgcctatgtgcccgacgtgaacaattccgcttacatcatcttcatgctgatagccattgtgggctatttcaccattccgacagtatccacatgggtgattcaggcatcgggagccggcaattacggcaagcaggtcaactcgtggtcactaaagggcggacgtgcggctgccgccatcaccggtgcttccatcgggcatatagccggcaagttaagaggaagatgaaccaacgtaaatattagagatgtatggaatttaaaagtttaaagaatatagaaacgagcttccggcaaattcgcacgatggggatcgtgttcgtttcgctctgtgctctggttaccggctatgctctctggagctcctaccggttcgccgaacggcagagggagaaaatctatgtgctggacaatgggaagtccctgatacttgctctttcccaagacctttcgcagaacaggccggtggaggcgaaagaacatatccggcgtttccacgagctgtttttcaccttgtcgcccgacaaggcggctatcgagtcgaatatccgccgggcgttgttcctgtgcgacgagagtgcgttccgctactacaaggactgggaggaaaaggggtattacaaccgtataatctcggccaatatcaaccagagcatccgggtggacagcgtggcgtgcgacttcaacagctacccgtatgtggtgacaacttacgcacggcagtcgctcgtcaggtcgagcaacatcacggaacggagccttgtaacccgttgccggctgttgaactcggtcaggtcggacaataacccgcacggcttcacgatggagcagttcaatatcgtggagaaccgggatttgagaaccgttgaacgataacttaaaaaaagagaggaaatgaaccgattgaaaaaatggatcaggtatgtgcctgacaggatagacgacggactccgctatctgtgcggacggatgtcgcccgatgtacggctcgtctgcgtggtggccatgctcaccggcttcggctgtctgtcgatatacatgacggtatcttcgatataccgcatcggcaggcatgagggggagcagttgcaaatggagcatatcaggcggatggaactgtacagggggataaacaaggatagtataaacattaaaaatcaggtggattatggagaacctaaaaaatcaggaacggcaaccggcgaacgctgcaacgtctgaaaaagcggaagagaaagggcaaacgccgaaacaggggaagaaagaggccagacctctgactccggaagagatgctcaaacgaaagaagatgctcgtgtatccgttgttctttctcgtgtttctgggagcgatgtggctgatattcgctccttctgacagcgacgagccattaagggagggattcaacgtggatgtcccgatgccggaggacaaggggctgccgtcggataaaaagaccgcctacgaacaaagtgcctttgaaaagaaacaaaaggagaaaatgaacacgctccaggatctggcggtatcgctggaacaggaagagccggtggcagacgaggtattcctgacggaagaggacacggacaacggcagtccgtctatccgttcctccgccaatgcctatcaggacatcaaccggcagttgggcagtttttatgaaacacggcctgcggaagatgaccagaaaacgctggaactggaatggcgtattcaggagctggagcgtcaggcggaggaagagcgcaaggccagagaaaacggtgaggaacaactgcggctgatggagaagtcctacgagatggcggcaagatacatgccgggcggtggtgaaaccaaacaggtcgccgtgtcctcctctacgggtaaaatgccggtctgcccggttacgcaggtagcggaacgggtggtcagcctgctggccgcacccttgtccgatgaagagttcgccagacagtacggtaagcccagaaacatgggtttccacacggtggggacagtccggagccgtacggaaaggaatggtatccgtgcctgcgtgtacaggacggtaacggtttcgggcagcgacggtcaggaggtgggactccgcctgctggagccggtgcaggccggagagttgtacatacccgccaacacgatactgaccggcacggcgaaaatcagcggtgaacgcatggaaatcaccgtttcctcggtcgcctttcagggaacaatcctgccggtggagctggacgcttatgacacgaggggcatgaagggcattgaggtcaggggatcgcaggagcttaccgccgtcaaggagatggcggccaacatgggttcggcaatgggaagcagcatcaatatctccagcaatgccggtgcacagctggctgcggacttgggcaaaggggtgatacagggggcatcgcaatacctttccacaaagttcaggagtgccaaggcgactttgaaggcggattacgagctattgctcgtgtcaagacaataaacggttaaaatcaatttattaatcaagaaaaaacaacaagcatgaaaaaagtaattttaatgatggcttttgccattggtatgaccggtgcgtatgcacaaaagaccgtgaaagtggaaaagacgggaaatgacacggaagaaacggcggattccggagaaacgggaaccacgccgctgccggataaggaggacgcaaggcgcagcccgtccaccggtgatttgtttgacgggctgacacgtccggtgacattcgaccggatggttcctccatacgccttggaggtgacatttaataaaactgtacaccttatcttcccggctgctatcaagtatgtggatctgggatcggctgacattcttgccggcaaagcggacggttcggagaacgtgcttcgggtgaaagcggcgttgagggacttctcccgtgaaacgaatctggcggtgatcacggatgacggcagctattatacattcaacgtgaagtatgcggacgagccggccaagctgaatatcgagatgaaagacttcatccatgatggcgaggcggtgaaccggccgaacaactcgcaggaaatctaccttacggaactcggcagcgagtccccgctgctggtacggctgatcatgaagtccgtctatgacaacaacaaacgtctggtgaagcatatcggctgcaagcgcttcggtatccagtatatcctgaaagggatttatacgcacaacggtctgctttatttccatatggaactgaaaaacgcttccaacgtgccattctccgttgactttgtcacttttaaggtggtggataaaaaggttgcaaaacgtaccgccattcaggaacaggttatcgtgccgcttcgtgccttcaacaatgtgacggcggttgacggaaagagcaaggaacggacggtatttaccctgcccaaattcacccttccggatgacaagcagctggttgtcgagatgaacgaacagaacgggggaaggcatcagcggtttattctgaccaacgccgagctgattcgtgccagagtcattaacgagctgaaggtgaaatagtatgaaaagggtctctgttattatatgtatacttttgtgctttgtcctgacggacaaggcacatgcccaacgttgcctgcccggtacaaaagggctgcgtattaccgccggcatgacggacggctttcacactgcggacaaacgtaacgagctgggttaccatttcgggatgggaatggacagatatgtgaacggctgccataagtgggtattcggtggcgagtatctccagaagtattatccatacaaggacatacgtgtcccggtttcccaattcactgcggaaggcggctattattataatttcctttcggatgccaacaaggtgtttctctgctatgccggcggttcggtgttggcgggatatgaaaccgtgaattggggcacaggcatgctgttcgatggttcacgcctgtgtgtcggggatgcatttgtctatggcggtgcggtatcgctggagatagaaacctaccttgccaaccaggtggtattgctgttccatgcacgtgagcgttgcctctggggaaatgacagcggacactttcatttcctgttcggggtgggattgaaaattattttgaattgataaaacaataatagaatgaaaaagatgattgaaagcatgattatagcaggttgtatgctggtagccttgttatatatgaccgcctgttctgacaaattggacgttcagcagatgtatgagtttgatctggcgaccttgccggtgcagacgacaatcgtaaagggcgaggaagcggaaatccgttgtcaacttgtaagaagcggcgagtatcaggacaccaaatacttcatcaggtacttccaaccgacaggcaaaggggagcttcgcatggagaacggtacggttttgttgccgaacgacctgtatccgttaccggaagaaacattcaggctctattacaggtcatttggcacagaccagcagaaaatagacatttacattctcgattccttcggtcaggttgtgcaaaagtcttttgcctttaataatgaagcggaagatgaaaaggaggataccgaatgatttatgccggatataccccgaaaaaaaagcagcgataacgctgagtagagaaactgaatgaaaatctaataagatagctccccttaccggaatggaaaccggtaaggggagcttgttcctgtattatttcttgtcctctttctttttaagccactcgttgtattgtcgcctgcactcttccaatgtgggcttcacacaggagaaaagttcgttgtctgccgtatccctataatcatagtgatagaacgtgcgccttttccgtcctacggtcatttggaatttttcatatttctcacccgtcttgcaggttgaaactccgttctcgttcatttttgttgccataacttatgattttatagttcgtgaatattaaaacagacttaactgtcggggctgtgtgtatttccgcttgatttccaacagttttcctttcagactgcggataacctttgggttgtaattgcttctgtcggaaacagaccaacgttccgctttattgtattgttgctccaacaggcggattccttgtcggatagcttccttataatctctgacaggttcatcccaaacggacgggtggctaccgcctccggctgtgccggtacaccagtcgatggctaccgcatacgtcccgtcaacggattgcccgatatggatcgtgttgaaggtgtctaacttgatttcctctattatcggcaacatgccatttatccaaccgtgttcgttgaactgcttgccgacataaccgaaaatcatccctctttcatacgtgcgtacattgagtatgatatgtcgtacactcttgccaaaactctcgaaataagcgatttgttccgtgtcattacggcgtactgccaacaagtaacggaggactgcactacgctctaccctgcaagggttgtactctacaatctcctgcaatttctcttctcgtgtcatttgggatattggtttcatatcatttatgtattagagggttaaaatgttgcaatgaataatcggctttggatgaactgcatgcttcctttggaaatgcgctggttgcaccagaaatggtgtgagccgtagccgtaggtgaaaaactcgtccagttcggtcgtttcccgaagtttgtcaatggattggcggagttcctcttctgtccggcaaaagagaagggtgtttaccagtcggataaggagtgcagggattttttcatcccatgcacaaattgtggtttcaaacgttacgttcatatttttctgatttattcattagacagtcattttcaaaatctctctccagtatatcggctccacctcactgagaaggaaatcgataaaatcttttctcgcttctttgcacaattcctggtaaagctctccaaaggtggtgatgttgccgttcaggtaggtttccaccatgtactcgaaaatgttgcttacctcgtaatatctgcactgctgtgcgacagtcctgctgtatcgtttcataaggctttatttataaagatttataatgattctgttcattatccgtgcttttcctacggtataataagtaccgccatagggctgcttgtcccaataggctaaaacaatctcggagttgtcaatcaggtagtcgttcctgtggtggaagcagcctttgcggtaatcttctcggagaatgaccgtttcatcggcagttttcattatccggtcgtataaggacttgttctccggccggtatctgtttgactgccggctgaacggcacaacggcaatgagtcgaatgtccgtgtattccgctttaagggcagttaccgcttgggctgcaagcaaatcgaagccttccgccattccgcttagaaagtagcgatagcccagactatacaaccttcttacttgcgaaactatatccagataaagatgcagcataccgacttggaggatacgctctgaacggtgtccggtgaacgctactgattttgtaatatccattgtcataactgtatgtgttaaagaattaataaccaaatgataatcccgactacgactgcaaaggagagaatggaaaccagacacccccatgcggagcggatcacgtccgttatcagttcttttgcgagccataaaccgataaaccacgctaaaagactgccaccgtacagactccaacagcagcctgaaagaaggagccgaactaaccagccaaacaatttatgcagaggcagattgagtctgttcttatttcctttatgtatttctcttgctgttttcataatcacgacattttttttatgcattgacgagttgagctgacttatttcatgtgcgtcaaaaggtcgggtttaggaaaaacaaggttttgggtaaaaatacctcgtgccattatggcgcagggaagatttttttcaaaaccggaacggcttgaccttgtttttccgttaagaacccgaagtacctttgcacttgaataagttagtttaattcgttcctttgctttaaatgtggagtgatggctactgaaaacagtgagagaaataccccgaaggaagttagccttaaactttgcttaaaatcgttgtgttataaatcccttatacataaagcgatgattaatacgaaaaaaattctacctttgtgttagcgatgcaaatagcatcgtgtaatctgttcgtttaccgtagtccagaaatcgccaatttcaaaaatacagaggtaaatgaaccgggtaggttatatactttgacgtaacctgtcggttcactctgtattgagcgtttggcgatgctttggacttgtgactggcagcgttacgtcaatttaatataataacgttattgttatggatttacaatcgactctcctgaaaggagtagtccggtcttcagaagatgggcttttctatctgtttcccattcagagtctatctacattgcaagagatgaaagggcatttgacctgtgcgatagatgtcttgagcaatccggatgaaagtgatgtggaaaagcgtttggacgcagttcggacattgaacagccttgtggctgcattgagtgttaatgacggtgatcactatgatgtgatagatactgcctttgaggagatcagagagtaaaaaaacagagcgatataataaaagccttcctatttcaaaaccggaaaaaagaaaggtgttgtactgtccaatgtgtgattcatcgcgcttgtttgtacaacacttttctgcggttttgtatggatgaaagattgttccggttccggaagaatgggaacgttttttctactgataataatgtggcttttattccgttattgaggttggggattgaaatgtaagaacttcatctgttccgttattaatctgttcctgttcacgctctttacgccgtatttctttttccttcttttttgttttagtctttatttcctgttctttaaggatttgctttaggggcttgactacatcaggacgttcctttttgaaacgtttatagaagatctcttctataaattccggtaagggggctttccacggttcttgccggtggttgtctatcttgccgagtttatcgggattgagtccaagttcacgggccatttgtacatgggtatccgatagccggtgtttcttttgggcgactatccatttttcgatctgggatttcttgattgccatattacttttgattttcagactttattgttttacctaaatacaaaccggtaacggattttgcaccgagttgtatcagtttgcatttcatttgcgtgaaattctcgccggaagagataatgtcgtctattaaaaatacgtcccggcccttaaaataatcgggatgaaagatcaagttggataacttgtcttgtccgtgagttcctttcatctgctcacggtcttcttttatccatgtggcacgaaatccgtccacgactttaagccgacgtgagagaaggctgcaaaaacgggcgaagcgggtgatgttccgttcacgggttgccgccggtatggggatcagcacggcgttggcggctttctccttaaagaacggcatccgggcgatacaaagcgagaagatcttggcgacaagagctgcttgtcgtccttctttaaatctaaataccagattgctcgtctttctgtcagataccgatatgtccttgcatctggtcgggtaataatcgtggatatagaaacacaaggctccgtcgatacgcatcttgcctttgaaatgggtattgtatgggaagaactggcgcacgaaatcgctctcgaaagtaaagtggagtatatcacgccaaagggtgagcgtggtttcatcctgtacccgatagagttctccgttgatactttctttatccgataaaccaatgccgattatcaggtgtcattgaaagtgtcttttgatacaatataccaatcaaaagattggcagatgctcacgatgtcacagttattggtgcaaaggaagtagaaggtattgtcagacctctggataatcagaaactcgccggacatttcggaaaggcgaaaatagttgctgatatgggcttcctccacctcgctgaaggatacggatatggtgaggttttctatcatgacattgttatttggcgtaaagatagaaatttcgggagaaaaagaggccttgcccgttggattttcgggtaaggctcgctatttacaggtttctatgcacgttagttataagaaatggtagtccggttgctgtcgggatggaaaacaacaaggacttcgggctttttctcttgcaggcgtttgtactcgcacagggagttgagtacccactcacgaaacagcttcgtgcaataggtgttgatgcggaagctgagaaatatgatcgcttccagattataataggtaacaatgcttttgttctgtttctcggttatggtcacgtcgccgtcgtaaagcaggcgggatttgaagatggagcgcacattggcgtctattgtctgaacgaacactccgaacagacgggcaagttcgtgcttggtcatccatacgttgccgttctctatctttacactgacgatgggttgttcatccttgttttccaaaccggtgatggtgatgtatcctctatttttcataaggcgttgttttttaaatggtgtgacaatataatgatttgtttattcatacagcgttttgcgccgtacctttttgcatattttttagttttcgatccagcatattcatgtcatggctcaactttctgtccaccacacgggcataaatctgtgtggtctgaatgttggtgtgtccgagcatcttggatacgctctcaatgggaacgcctttggtaaggcagatttccgtggcgaacgaatgccgggccacgtggaacgtgacatttttgtcgataccacatagaacggcaatttctttcaagtaatcattcatcttttgattgctgataacaggtaatagctgaccgtttttaagtttcccctcgtatttgttcaggatagctttaggaatatccagcaagcggatatttgatgttacttttgtcttgtggcgtttctttataatccacagattatcatcaaatgccatacgtatatcgttgcgggttaattcgcatatatccacgtatgaaagtcccgtgtagcagctaaaaatgaaaatatcccgtacttgctccaaacgctttgaagcaaattctttattgcatatcctgcttatttcgtccttatcaagataccctctttctatatactcgaatttcagtttataatgggcgaacgggtctgcggttatcagccctgtaccctgtgcgaaatttaccactgtgcggaaacgctggataaacttcattgccgtattgggtgaacaatcgtggttctttattatatataggtagaagttttcaatgaataccttgttgatttggcgtataggcaaatccgatacatgatattcatctttcatgtattgagttaagcgtaactttgtcagttcgtatctgctatacgttttgggtgtggcttctcctgcttcgacctttttcttgtattggtcgttgtgctgggtgaaaaaagaaataatggtatttgcttcttcctcttttcccaatagtgcattttttacgctttcgggcgtaacatagctatcacgcatcaactggttatggaagtgtgaacggatattagctttgatgtcgtccagcatggaattaagcctttgtatctccatagatttgcctacggctctgccggatttccagttagtttctaagacctctaacttggtattgaattgggtctgtttgccgttgattgtgatacgggcatgaatgggtactaaaccattctttttcatcttgtcttttttcaggtaaaacaatacgctgaatgtactcttttcatttttcataatctcacttttttagattgcaaaactaattttaatcactgtaaatgagataaatagagtatagacaaatcacgtcaaaagtaagccattttccgacaatcgtaccccctaatcgtttttgggggaagggggtacgatttggatactcaaccgtgtcttttcgtgccccttttttgtctttcaggcaagactgaaacaataaaaaaagtcctacaatacgttgatattgtaggacttgtctcttttttgtcgccgtttggctttgttcttatgtgatccgcctggggctcgaacccaggaccccaacattaaaagtgttgtgctctacctgctgagctagcgaatcggtccttcagtgctttctttcgaatgcgggtgcaaaggtagaacatttttttataactccaaaagaattcaaacatttttcttatctttgtgccattatcaacaatatataatcatacattatggctgctgacgataaaataattatcttctcgatggtgggagtgagcaaggctttcacccccaataagaatgtgctgaaagacatttacctgtcgtttttctatggagcgaaaatcggtattatcggtttgaacggttccggtaaatcaacgttattgaagatcatcgccggtttggagaaatcctatcagggagaagtggtgttctctccgggatattccgtgggttacttggcacaggaaccttatttagacaacacaaagacagtaaaagaagtagtaatggaaggcgtgcaacccattgttgacgcactgacagaatacgaagaaatcaatcagaagttcggtttgccggagtactacgaggatcaggataagatggatgctctttttgctcgtcagggcgaactgcaagatatcattgatgcgactgatgcatggaatctggacagcaaactggagcgtgcgatggatgctctccgttgtccgcctgaagatcagccggtagaaaacctgtccggaggtgaacgtcgtcgggtagctttatgtcgtttgttgttgcagaaaccggatgtgctcttgctggacgaacctaccaaccatttggatgcagaatctatcgactggttggaacaacatcttcagcaatatgaaggtacggttattgccgtgacgcacgaccgttacttcctcgatcatgttgccggatggattctcgaactagaccgtggtgaaggtattccctggaaaggtaactactcttcctggctggaacagaagacaaaacgtatggaaatggaagaaaagaccgtcagcaaacgtcgcaaaacactggaacgtgagttggaatgggtgcgcatggctcccaaagcccgtcaggcaaagggtaaggcacgtcttaactcttatgacaagttgctgaatgaagacgtgaaagagaaagaagaaaaacttgaaatcttcattccgaatggtccgcgtctgggtaataaagtcattgaagcgaaacaggtggctaaagcatacggcgataaactgttgtttgacgatttgaactttatgcttcctcctaatggtattgttggtgtgatcggtcccaatggtgcgggaaagacgacactgttccgtctgattatgggattggagacagtagataaaggagaatttgaagtaggagagactgtaaaggtggcgtatgtagaccagcaacacagagacattgatccgaataagagtgtttaccaggtaatttccggtggtaatgagctgatccgcatgggaggacgtgacatcaatgcacgtgcatacctttctcgtttcaatttctccggaggcgatcaggaaaaactttgcggtgtactgtccggtggtgaaagaaaccgtttacacttggcgatggctttgaaagaagaaggcaatgtactgttgctcgatgagcctaccaatgatattgatgtaaacacattgcgtgctttggaagaaggtctggaagattttgccggctgtgctgtagttatctcgcatgaccgttggttcctcgatcgtatctgtacacacatccttgcttttgaaggagactccaatgtattctacttcgaagggtcttattcagaatacgaagaaaacaaaatgaaacgtttgggaaatgaagagccgaagcgtgttcgttatagaaagttaatgactgactagtataaagtaatagattgaagcatttctaatgctttctgtttcaaaataaaaggctctgcaaatattgtggagcctttatcgttttataacaagggaaaacgtttatctctcttaaaaaattgtagtataatcgtaatgtagttctaaatattattaattatatttgtgcacagtttttaaaagcaaacaatttatattaactaatcaactacatttatgttaaagagaatgcgatctttcttagtgctagtaatgttatttattaccgtcacgatgagcgcgcaggttacaacagccacgatgagtggtaaagtgaccgcacaagatgaaccaatcattggagcaacaatcgttgcggttcacgaaccatcaggcactcgttatggtacagtgactaacgtcagtggtcaatttaatctgcagggtatgcgtaccggcggcctttacaaagtagaaatttcttatgttggttatcaaacagcaatttacaagggaattaatcttttactgggagagaattatgttttaaatgtttctttaaaagagagttcagaactgttggacgaagtagtagtgactgcttctaaagagagtaatatgaagtctgacagagcaggtgctattatgaatgccaatcgtgatatgattaatagtactccgactatttctcgtagtattagcgatatcatgcgtctttctccacaaggtgctgatgttggtaacggttttgcagtaggtggtggtaactatcgtcagtcatttgtaacagttgatggtgctgcttttaataatacattcggattaggaggtaatctcccggctaacggatctccaatatctttggatgctttggaacaagttacagtggctgtaactccgttcgacgttcgtcagagcggttttacagggggggcaattaatgcagtaactcgttcaggagataatcaattccgtggaacggtttatggttattttaataatgagaacctgcgtggtgatagggttgaggattataaactgactcgttcaaaatcacagtattatacttatggtgcaagttttggtggtcctataattaaagataagttgttcttttttgtgaatggagaatatgaggacaatgtaacagctggttcaagttatcaaccacgtacatctttagatcaagaatatacgggaaatgtacgtcgtcctgttgaaaatacaattgttgacggaaatgagacttgggttggcttgaatgatatgagacaatatttgaaagagaaatataactatgatccaggacgttataataactattctgtaaatactccggcatatcgtattatggctcgtttggattggaatgctaatctgaataataagttaagtctccgttttacaaagactcatacaaaagattcaaatttcccatcaagctctactagtcctttgagtgctgatgatatttatccaggtgatacaggattgggtattccaaaaggaaaggactctggacgtagtactaaatattctatgagttttgagaactcaaactattatcaagtgcgtgattttacatctgtagctggtgaatggaactctcgtttcgctaatggagctatgaataatatgttacgttttgcatattcttatcagaatgagccacgtgaatatgacggtaatccatttccgaccgttgatatattaaaagatggtgcatcatatgcaggttttggtatggatgtatttacacaaggtaatttgcgtaaaacttcagtatatacagtaacggatgagtttaattggaatgttgggataaataagtttatggctggtttccagtatgaacatactaaggctacaaatggctatatgcaagctggtggaggttactatgtttatagctcatgggatgattttgtaaatggtaagaaacctgctgcttttggtataactcactctaatgctgcggatttatcacagttttatgcagaaatgaaatttcaacaattctctctatatttgcaggatgaaatagcattgtctgaaaatcttaaggttacaggtggacttcgctttgaattaccaatttatccctcattgaagaataactataatgaagactttgcaaaattggattttggaggtactcgttattctactgatcagttacctgatgctaagctttctgtatcacctcgtgttggttttaactgggatttgacaggcgaacgtaaatatgtgcttcgtggtggtacaggattatttgtgggacgtttgccgttcgtatggttagtatctgctgtcggaaactcaaatgttgggcaaacgcaatatttttataataaggtggatgctaatacaggtaaacaacccgatttccatacaaatgtaaatgatattttgaaagatctttatgatggaaaatttactccgaatgaagttgtagctccacaatctccaactattattgatacaaatttgaagatgccatccacttggaaaacatctttagcatttgatatgaaattgcctggtgatattgattttacagttgagggtatttatagtcgcgattataatcctgtagtcgtttccaatacaggttacaaaccatctgaaacgacagtaactctagctccgggggatgtacgtaatacatatacaatgtatagtgatgcaacttggagaaataaatatcaaaatgtatatttgttagagaattggaaaaagggtgcatactattattctatttctgcacaattacgtaagaattttgattttggtcttgatgtatcatttgcttatactcactcaaaggcacggtcttacagtgatggtattggtgatcaggtaacgtctgcttataagactaatacttattctgttaatggtattaatgaacatgaattgggatatggtacttatgtagcaccagatagagtattagcgacaatcggatatcgcaaagaatatggaaagcattttgcaacaagtgtatcactattgtatgaaggtatgcaaatgggttttgctggtagttattcatacagtcgttattcatatacttttggtggaaatgtggttggtgattatggagcaaataatctgttgtatgttcctgcaacacgtgaagaattagacagctggaattttgtagattcaaaagataaatcaggtaatgttacttatgcagctaaagatcaaaaagatgatttttggaattacattaaccaagatagttatttgaaaagtcgcaagggtaaatatacagagagaggtggagctaaaatgccgtggcatcatcagattgattttaaattgaatcaggacttcttcttgaatgttaatggaaagaagaacattctacaggtgggtgtagatatcaagaatcttcctaacttacttaataacagctggggagtatataaacaagtgaataatacttctttgcttaattataagaatggagagtttactatgaataagaatggaagcaatgtgttgaccgatacatatcggacatatcaaagttttagatctacttattcggtacaatttagtgtacgctacatttttaactaattgagaattaatctcataatattagaaagccgggtgactttgagttgtccggcttttttatatcaaacaggagtgtgaggcattaaaatgcccccaaagctatgtactaattatttctatttgtaatgtattatatgttttcttgtaaaatatattgtttttgcctttgccctgtcaattttattccttatatttgagacacataaacattatagcctatggaaatataaagacttctctctgttgtcgtattcaatcgacattttgtttttcatatcaagtcattaactttaaactagaacattatgaaagcaattgttagccctttgtacttcatttatttgttcgttctaagcctttttataggtttctctattggtagttgtagtgacaatgaatttgaagagttgagtgataatagtaatgcgacgaaagttcaaacacgagctgtaccgactcctgtatttgattgggaaaatgcagactggatgcctactccttcaatgcagtctcgaatcccttccccatggtccggacaaggaagtttggttggaacgtatggaattgatatagtcaatgatagaaaagcatttgatggatgggaattattgtataatacattcgattcgaatgtaactgctcctttggtaaatccttattttgtactttataataaatataggggaataatgcgtatctatttatatttaacaacttcatttgttacgacttcatcatatattcaagatggtataactgttgtttcgaatcgtaaaacatctattttaaattatttggggcaagatattatagatttggataaggagcctaataagcaatatatgcaaatgcaaccggctcctatggatggttctctacctttggctgctaatcgttggtatatgatgcaatatgaactggcttatgatcccaatttagctgatattccatataaggatattcagtttagctggactttaaattattataatgttcaacagataagtctaggagggaatataacaggcagtcttaatggaacaattggaagtgcatcaggatcaaatttgtttaaacccttattaggtgttggtaaggctgtgggtactggtgtgttggcaggagttggaaaggatttaatcactcataatactattaatgcagaaactggagaaaataaactgggattgtctaacaagatatttaaagacgtggcaaaaggagtttctgccgctttatctgctgcatcgggaaacatccctggtgcaataatgggattattaagtgccgttgcaggtggtagttcttctactcctacacctattagcttgacattgaaggctgaaattgagctgaagggtactgggacagagggtggtgcctttccttcaactcctgtctcattttggataccaggcacgaatattacatcggaagctactggatttgttccattatatgataaaagtttaggcgttctatacttacgcgagaagcccaaattggtgattagtgaatattatgatgaaaaattttatgaggtagatccagtgtatggtcatgatatattagatggatataattattatttttattttccaaaaactattgatttttctaattgtttggtagtaaatcccgaagtagaggagattgcagatgttgaaattatgaaacaagaggttgtgtatataagagatgttgtatgttcccccgaaaattttaattggtgcggaattactgacatatatggccaccagcgtggaccttattggccttggccattttcagtgcgttttacagttaaagtatctcccaaaaatggagctccttcatcaattataataaaaacttttggaattactcctgaatttagaaattggccatattgggaaaattgaacgacaataaaatgaagtctatttagtctaaagtcattttgaaaagaatcccttatttatagttccattcattcttatgaagaaactaatataagggatttcttatcttcttttataacttcaccctcatcaccaccggattatgatcgctataagtaagatccggcgagaagtaacccgtactattcagttccggtgaatggagaatatagtcgattcttaacagatgcttgaaaaacttgaaagtatacatatacccatgaccgctcgtctgaaaaccatcctgcaacttatcaccttttacagtgtgataaacatacgaagacggcagagagttaaagtcaccgcagatgatagtaggatagggggaagcagctatcagttgctttagagtattagcttgtacggcacgtttccggaaattctcatgtaatccgtcaatcaatcccaaagcagcacgttccaccctttgagaatcatccgtgcggagtcccttttccagtttgcgcttgttctggctcacttccgttgtttggagatgattgttgaacaggcggatgatacggccattaatctcaatatcacaccagagactgcaatttttcgaatcaggatagacgataagattctcctccttgatggggtaacggctgaaaacagccagctgcaacaaatgtttaccctcgggagaaataggaataaaatgatacggccaattagaaagaaccgcagctatactgtctacaccaaactcatcgtttataccaaactcctgaaaacagagaatatctgcttgcagatttctcatgtaagaggctatctctttgcatgaataaccggtatgctcatgattaaaagcgtcaacgttgtaagtagcaacagttagaataccaggagtatacgcgttcattttgaccattggagccgaagccgggctgaaaaaaggagattgaatcacacaactaatatagctccagttactaaatatagcaatcagagggatgaaaacccaacaccgccaacggatcgtccagtagatgacagaagcaagattagccaacaaaagtatcggtaaaatcaaaccgatgaaaggcataaatttgaaactgtccggtgcggcattacctacgaaggcgcccgcaatggtaactcctgccaaaatactggtcagcacgatggatatgtaataaaacagtctgtaaaaggctttcatctaatctaagttattgggtgattatatcactattaaagcgttttctatacaatatgtactctataatatgtgcccttttacggaggcgacaaccatttatgaatcatagctttcagcttatcatccgctatcggtttagctataaaatcattgcaccccgcttcttcagccgctttccgatcctgttcgtatgcaaaggcactttgagcgatgataggaacagtggcagacagttcacggatgatttttgtagcttccagtccgtccagattcggcatcttgatgtccatcaagataagatccggtttcacctcatcgaacatcgtgacagcttccattccgtcatgcgcacgtataagccgatggtctttacctagaatggcctccaataagtcgaagttactgtccgtatcttcggcaatcaaaatacaggcatgccgtgtatttacagaactgtcaacactcgaatcaacagcttttccggcagatgctatcccagcaatgttcccttcaccattctctttctttgaaggaactgcatttgcaggatttgcgatcgtgtacggcaaagtaaatgtaaacgtcgttcccttaccaaattcggagctgacggaaatcttgcccccgagacgctcaacaatagacttacagatagataaccccaatcctgtgccctgcgcatgattgttcaactttgcaaaacgttcgaacacacgtcccactttctccggctcaattcccgtccctgtatctgttacgtggaaaacaatctggttgtccaccaacttataaccataactgatacttccttctttcgtaaatttaacagcattcccaatcagattcgaaatcacctggaatacccgattcttgtccgtttcaatcaccagactctcgtccgaaggctcatagacaagactcactccctgcggcgtacggaatatatgggcatcgtacacttcccggcagagattatggagactagccggtccgaaggaaaactcgatagttcccgattcaatcttcgagagatcgagaatctcgttgataagttgcaaaagacgctcgttgttcgcgtttacgatgttgtagtacgtctttcgttcttccgcatcatcactttcggcaatgagatgcgagaaccccacaatagcattcagcggagtacgtatctcatgactcatattggcaaggaaagctgatttcaaactatcagacatttccgccttttccttcgaagacagtagctcccgcttcatcatttccagttccgtgacatcccattcgatgctgacgatgataggcgaagacagttcgtccccatccacccggattttccgcttgtcaaggataatcaggtttccgttccgatcctttccttccaccgtccagtgcataccttttccactggtggccacttgaatatcctcctgtctcttcttctcggccacgataggcggatagaaatcgaagtcattcttaccgacaggatcgttcttgtaaagatcgcggttataagcctcccgatttcgataaatgtaccggaaatcattgttgatctccttcacaacaatccccgcggggagattattgattgtcgtatccatgatttgattgagccgtttgatttgggcttcgtatcgaatcctctcggaaatatcatgagcaaacgaccagtaactttcttctccggagtcattggtgacgttgtacatcgtaccttcgtaagccaatatacctttattgattttcgatggatgatgagccacaaagttactgctgccaccgtgtatgacatctttacaacgttcgtcccaagcctcttgcgtaggcatatctgcggcgacattgtagattttcaactgactgatatcctcactttcgggaataccgtgattgtgcaggaaacgacgattggcgaagataatcgtgccatcgggtctggcggcaaagatactctctttggcgttgttgatagcgtgcgtcaacgtattgatgtcatttctgcgatgctgtatgtccgtaatattctgaatatacccctcgatgttgaaactgccgtcggggcgctcttcacgcaaataagtctggatacgcatatagaagatttccccgttcagtcggacgcgatagctgatgctctccatgttgagctccctttcgttcacccgacaccattccctgaaactctgacggtcttcttctacaatcagttccacatatttttcaatggcgagattctgcacactttcctcacacaaaacgcctgtataacccaaataatggaaaatattctgattcgtattgtacgcccattgtcctatctgggctaccttttggatggcccgcagggtgagatttgcttgttccaaccgtctttttacattgcttctttgcgtgatgtcgcgatattggcaaagcaccatgccatcatacggaaacatgaggcatttgaagtagaaaatttcgtcattcagcaccagcttgaagttcttgctgatgctacgctgctcttcgagcacaatctgaaagatgggcatcaccctctctcttgtatattccggtaaaagctcaaatatattttttcctaaaagtatatcctcttgcagaaaccatagatcacaatgaggctcaatgtctacgcagacgccatgcctgtcaaccaatagcattgtatctgccgtcagtttcaatattctttgtgcgttattcgcatcatgtaatattctgtccatgtctgttctttattagataatagagacttatgtctcctataaggataacaaaagattatggcatttgttcttacttttcggcgcgcttcgccttttcccaagctccgcttccttttttcttcttgagatagcggatgcctttcagcacattgacattcataaataaaaagtagtaggggataaagagcaacttgttttttatctgtttcgtagataggtaatatccccaatatcccaacccgtaaaaaagaacctgcatggcaagcagcactccgtaaaatatcgtggaaccacccaacagcagaatcgcaatattcagcgggaagagcgcaaacaacaggaacggagtaatagaccatcgcaatacccggtgcgacgtatattgaaagctaagtatcccgtaacggaaaggattcagcaacggacgaagccgccagatagactgcaatcctcccgcagcgatgcgcacttttcgtttttcttcttcgcgcatatctgccgaaccactttcgatggcataagcattcgtacaataagcgatggtgtaacctttcattgtgatccggagtgaaagaataaaatcgtcgagcaacgtatccggctccatcgcttcgaacagctcgttacgcacggcaaacagttcgcctgctgctcctacggcagagtagagccgtgcatcaagtgctttcagggttgattcgtatttccagtaaataccttcaccaccggcagccgccccgtcttttgtctgcacggcaatccgtttttcaccagccacgcagcccactttcggatcctggaaagcaagcacgatttcccgtattgcctcccggttcaccatcgtgttggcatccgtaaaaacaacgagtggagtatccaccaacgtcattccacgtgtcattgcagccgtcttaccttgccggagcggttggaaatgtacggtcgctttcccctgccaacgcgtctgcaatcgttcgttcgtaccgtcatcgcttccgtccgtcacccatacgatgtgcagcttgtccgcaggataatccagctcaagactgttttccatcttctcgtccactacatcttcttcgttgaatgccgtaatgaagagggtaacttccggcaggtctgcgtccgatgccggcaacgaacgcttcacaggcttcacgaaaagctctttcaacttgacaagaatataaagcacaattccgtagcccaaataggtgtagaacacaacgaacagggcaagccagaaaataatttcaagacaaagggtcatggtttcgttcataattatatttgtttattacttcttctttttctttctctacgttccatcttttttattcgtttatgcccaaatagcttaacagttcgttttgcgtccggccatttattcgattcgtttcttcaactccgtctttttatccgaatctttcagcatattcacaaagtagttggcgtccgctttggcagaaacatctgtcggattcgcttcatatcgtttcacgaaattctcggcgtgttccgccaggtattttcggcagtcgatatttagcatgaagaaatctttatggtcaccataagagagtcctgtaacatcttcatttgattttatgctttcaatgtcctccattttaagcccgaaaatatttacagtcacggaagggtaatagaaaggagcggagtcctctccattcagatttagtgtcagtttccacgtgtgcgtatttacctgtttgatttccggtttgctgtgcaaacgatagtaataatattcataatattcttcctggttggtaaaccacatagagtcgtcaccatctcgtccgtatgtgtcgttgagccattccaagaagttcacccaaccggtatctgtattatgggcacctatagaaatagctgcccgctcttcttttggattttccatttccttgagaatagccgccttaatcatatccggatttgtcagcccgctaccttcgggtgggtcatagaaagctctttcgatcactacttgttcaatatctccgttttcttgaaatggatagagttttgtagctccgctttgtgcacacagggttctgattttatcatatctcaaagccgctttgatataatttttatctccattaggctctgccagcattttacaagttcgattattcagtttctcacgtatcatgctttgagcaacaggaaattgtgccagcaacttatcttctgttttatcttcgtcaggtagattcaagtcatggaaagcgatgcttactccgtaattcatcatttcctgcaagttgccccatactaacattgtctttttataaaagcggaaataatctcttgtatatccattttgtacccatgtttgtgtgttcattaaatcatcatcggcagccacggtagttccgaaagagaaacgtacttcctgtccggtaccattggtggtagctaatgtttttcctaatgaataataatcaggaggcaaatcaccgttttgcagatgagccagatcgcagtagtaaatataagataaaggtttgccatgaatggcagcccatgtatatgaaaaggctgaatgcatacagtcgtcttgtgtcatcagaaacagccaatctttgttatatttcaatgttggtatttccgtatacagatatcctacctgtctgtctgctttcaggtgaatggttatttctatttctttatcggctgtttcattaccgaacgggtatatgaattccgtttcgcagatgacatcctgcctctttccattatccttgttttcatcctcgtctttatctccttgatatagattcagtttgcggatacatcccgacataactaagccaataattaaaaataaaacgataccgatattgagattcttgcacataggctttcctttcttacttcttttttactagattactctcctcatccttatattccttcttttgggtgaacagtcctccgataccttttaatctgctgacgacacgcaccttgaaactattgaacaaagttccgtcggctcccaccgtcccatatccggtgacggcacgcgcacgtcttttccgtacaaatgcaatctttccgaattgcttgagctgcaaagccagatatccgtcttcaccgcggataatatccgtgcggattcccgttttcctcgcacattccgtccggtaagcaaataccagtccgcgcacactaagctccggacgcttgaaagactgcaaccataaatgcaagtcgcgtgcagcctcatagattttcagccccatccaagagtgatccttgtcgggaatataactccaaagcgagctgacagccactacacccggcttttcgagcgcatccaccattgtttccacatactttgccggatacatcgtgtcagaatcaatgttgatatgatattttccacgggcatggttcagtccgcaaagacgggcaaaaccacaactatgttgcgtttccgtgaaataaggcacaccgcaagcctcgtaaatctccgcagtgcgatctttcgattcgttgtccacaccaatgatttctacaggatatttacatttcatctcgctcaacgaccagaggcaggcaagcagatgtttttcctcattgtatccgatgagtgatacagtgacaagcggttcgttactctgcaatccggccagattgcggcgtacttcctcgataacggcttgcggagcttccgcaaaaggtttctcataaacctgtaaatacttagaataccattccatagatattgaatgctttatttgttttcattaaccgggataatcaggctttcaaatagttgtttccattgttcggcaatattttctattcggaagcgctggacgtccatacgcgcctgctgtcccattttcttacgtatatcttcattctctattaagtaagagattttctccgccagttgttcgatattcccgtcttctaccagcagaccgtcttttccgtcgctgataatatcccgcgggccgcagggacaggtgaatgatacgggcggcacgccacatgccattgcttctataataaccattccaaacccttcgaaacgtgatgaaagggcaaaaattgaactttcacagtacttgtcgacaatattggaaacagtaggttccaatatacaactggcagtgattcctaaagagtcaatttgctgttgcagttgctcacgcataccgtctccgtagatacgcagtatccagtcgggatgctttctggcaacgagttgccaagccgggatcaggcggtcgaatcctttctgcggaacatatcgccctactgctattacctgtttatggctattgtcagatatttggtcgggaaaaaaaggaagagggttatggatcacttcaacattatccagttccgtccattcctgtgcatcctcgtggctcaatacgatgaaacgtttcaactggcgaagttgccggtataactgctctctccaataattgcttacgattgcccgtaagaatgcgggcagacggctgttgctgaaatcccggtaattagatttgttaaagtgtatttcacccaactttgtgctgccgtccgtcatccgattgatgaaattgatgtcacgacggagcagggagatagtaatgtccggacgaatttggtgcagacattcgttgagtttctttttaaaacgtccttgtttcgcaatatatttaggtagttttttatagaatgacatttcgttcaattcatcataatcaatgtcaagttgatgaagagtgatggacggatgcagttcgtagtacggtttcttgcccttcccgtctgtgaggatgatatgtatttcataaccaaacacttcggcgaagtaatttgctttcagggtcaatactcgttccatgccgctagggtagtagagggcggggatgcagtaggctattttcatgtttatcagaatattgtttgttattaattgtgtttttgtttatttatctttggtctttatggcgtcgatcactttctgcatttgcgccttccacgatagcgggcagaccgattcgcgtatctcggcaggcgtcattttcagcgttttccggaagtcgatcagtccctgaatatccaccggagattcgtcgggtgccaccttccatacatacggcatgtggtcgaagtcgtcgtcggtttccgagtaagtgaacgcgaagccacgtgcggcatactcgcggtttttcaacgttttgatatacgtaattccgctgcggtggcgtcccaggctgccaatggcaaaatcagctttttcgaacatcgcatccagttcgtcgccatgcaaaggaccatgcagaagaacatacggttcgagatggttgttacggacaacaggcaagatccccgcccgttcccgttcgccggacagcgggcctacaatatggaaatatactttatattccggattgttgcggtaataatctgccaatccgcgcacaaggcggtcgaagccgtgccagtagtgcacttccgccactccgatcaagtgcaactctttcgaagtgtcattctgctgctgcttcatcggaatcgcctcaaaatcaattccgttggagatgcgtatggtgtttccgccaaatatttcttccgcattggagaaagtgacgataccgtccagagcctttgcgagcttgtgacggaaacagcggtcgatggctagatgaaatttcatggaacgggtgacgtactcctgatcgtaaggataagtaggaatttccatcaccacttttgcgcctgtacgtttcaacgacttcaccagccggagggtgaacggactggcattgtgaaaagagcgcatatatacaaagtcgattccttcgtggcgtgcatagtcaagaataggagagtagtagacacgtttccaaatctttgcggcaaagcccgtgccgaaatcagcgatcacttcgtcatccaccatccaacgccgttcgccataagaggtcacatcataatgacacaagcgaacatccactccacaatctttgagggctttcacctgataacgtatcttcttactaattccgttggcctcattgaagccgtgaaatataaggaaaagagctttcattcttattttcagtattcaataattgtttattctgttttttctttctcaaactgttttttcttcctcaaacgatttgggcgatgatttgtttccggtattcttctccggcatccgccacttcgctgccaatggcagtttcgttgacatattttcgttccagtttcacttttttatgggctcccatccgccaccattcatactctacgtccacatgaccgacgtcgatggcctgatagccggctttaaacaaatcgtaggccaacactgtggctgcggggccgagggcaatcagaaacaaggcttctttttctactttgcaggcctcctgcttgatgtcttccaggcgttcgaatgcatctctgggcggacaaagaatacgccggatgctccgggcattatcgaaaagatcgttgcccactccgagccggcttttctccccttcgatgaagacgatgtcccggttatcccaaatgcccttcatgtcgtgaaaccatcgggcggaatcttctttgcgggcaaaatccatatacggacgggtgacgaatgtattataatattttcgtcccgctaccagcaaacggtcccaccaagaaccgtacagataaaaatgagttctccagaaccggcgacttttgcgattgtagcgatacaaatcgcggaatgcgtcggagatgcagacaatatgtccttcttcgtgactttgcagcacttcggtcagtcttttagccaataacggatcacctttctggaaacggatttccttgtccggactggtgagcaacacttcaccgtcgccaaaacggctgacagagcaacggtcgtcgatgattttacgtatcgtttcgtcgatggaagctacttgcggtatgatttttctctttttccgcaagacgatgtaccagaaattgtaccattccacagtgctaccataacttattttataacgtagcgttataaaaatgtcgcgtatattcatagctatagacttttttttcttaacgaccgcactttactgatcatgtcatactcatgcgtcatctgtatataaatgccaaagataataaaactaacgatacctttagcaataattgtcacaaaaatgttcatcccttccagcgcatactgcattggaatgaggactaatgctatcaaaatgctaatcaccaacggagaaataagctgacggatgaacggccaggcactttgccggaaggtcacccggtacatctgccaataacactgtatgaagttgatggtgaatgtcaccacaatgcagctggccactgctgtcagggttccgaaatggaagatgccgagcaaaattcccgccacgttgaacgcggacgaaaacactccgcacacaaacaaacttcgtgtatcgcctgccgcctgaaagatggagccggacgaagaaagtataatctgaatccctacggagagcgacagtatccggaacacgggtacggacggcatccattgatcgccgaaaataataagcgtcacttcctctgccgtgaagaaaagcagcacgctaagcggcagaccgataaaggcgaggaaacggacgatgcgttcgtaggaactcaacagttttcccttgtcattctggaaatcgctgaaaatagggtgcatcaccggagtgattacctgcgtgatattctgcaagggcagcatcatcaaacgatacgacttttcgtaatatcccagatcggacatactcatatatttaccaatcagcagtttgtccagattgcggctgaaatagttgatgacattgaacaggaattgataggcggaataggaaaatattttccggagtaccctcaatccgagtgtgaaacgcaaccgttgcgggtaacgctgaaaggaaattacgaagatcagtacgctggatacgattgggttgataatcaatgcgtacaatcctgctccgcagagggcggcggttaccgcggctgcacctgccgaaatctgaatgacgaagctacggatagcaatgaatttaaattctttgttccggtagaacatggctcccggcacaatggtggcggaggcgaagaacaggttgacggacagcagttggcacaggatgcgcagggtgtcgctttggtagtaatcggcgatgatccacgaagaagcgaaaaacaggatgctgattccgatgcccgtccatatagtaaatgagaagatgtccgacaaatcatctttagtcagcgatttgtgctgcacgatggcgggagacactcccatgtcggtgagaagattgaagaaggcgatgatgacggtggcaacagctacgatgccgaagtcgtccggtgatagcagacgtgcgagaattcctgccacaacaagggatatgacgacgccactgtatttggccagcgctgtgtaaaatacccccgaaaataattgactcttaatattattagccattgattgcttgtttatatgtttgcgcgtatgcttgtcccactttgcggatgctcatgttttccataccgtatgcgtaattcacttccccttgtccccatgcggcaagccggcgggcttcttcgagtgctcgcaggatgtctttcttgtcgtcgggatcgaaagtcgggttaccggtttcggaaagcagttcgccgatgtttcccaccttgggacccaccacgactttgtggtagaggaaggcgagggggacattacccgaattcagtatatctttccgctggatgaatatcacgtctgaagcagccatatagtagggcagatcgcagttgtctatcagctcgtcgttggctcccgcctgtagtttatacatacggttgagcagcggcatgagcagatagtatccggcttttgaaatccatcgtttgatgatattcctgccatagctgttgcgtctcgaaaaggggtagaggcgcggagccagcagcatcttgtgctcctcgtcccaggcgcggaaagctccgagcaccatgcgtatttcttcacggttgcggaattttccgaaagccgtgacgatgaatgcatcttgcgagaggttgagatactgacgtgcacgctctacgctgatatcttctttataggtatactggtaaatgtgatgagggatgacaacattctgactatcaggatacttcgtgagaaattcgtcccggctaaaccgtcccatgtgtacaacgatatcactctgcgattcgataatgtcataggcccggctgatgattccgtttgcgtaatgcggacggacattgtggcgtgtgtagacaaaacgtgttcccctcgaacgaaaaaaactgattcgctcttccagacacctgatgatatcaggatcgttgcatgtccatcccaccacttcttccggccactggaaatgtatgatatcataatgcttatccgagtcccaaaactcttttgtggaacatcgcacgtcaattccagccattctgatagcatcgcataagataggaacaaatagattgtcggtttctccgttttctctgaaaacgatcagtgcttttattgatgggctgtctgtttcgctatcattcattttttaagttttaaagacttttattacattgcaaatgtaataaaacttatgataagtttcttcttttctgtgttttaattgcagtttaagttgctatttgaggaaatctgaaacaggtctaatgtttttataagccgtttttcttcttgggtataaggaatgtggtgactttcgatatattgcttgagaaagatgcaagcatgtatgaaaatgtctgtcttcatatagctggtgaaatttgtgtagcggtggtaggaggcttcactgatgttgatatgaacgcagaggtctcctatgactagctgtgacgttttcaggagctcttttatcagctttattctgttctgataatgctcgcttactattttattttcttctatttcttccaaagtttggttgcgttttgtatccatattgtttggggttattaataatatttggcaaaggtctgataaaaaatatataatccaactctcatttttgcgatagctggaataaaatacatttcgcacctttgcgccccggaagtattaaatgtggaataataaatgataaatgaaaatgaagaaagatcagtatttcaatttggaggtaaatttgttgaatgacgacaatattgccagtatgatgtcggagatgaatgccgcggaagcactcggaatttacgtgatcttgctgttgcatctacgcactaaagatgcttatgaggcgtcgtgcaaaccggttttactgaaggccatggcccggcggtatgatgtggatgaagtagcggtggagcgggtgcttcgcgaattcgatctcttcgaactggatgaggaacgacagatgtttcgttcttcttacttggatagggtgatgaaaagcttggaagagaagcggaaaatggacatcgaaaacggtaaaaaaggagggcgtccgaaaaaggtggcaaaaagtgctgaaacgcccgtcagtaaagggagaaaacccactgaaaaccagaagaggagagaagaggagagtaaagaagaggagagtaaaggaagtgtttctgttgtaaacaataataggagtaatatagaaacaccgtcgtctcttgtgagccgtttggcggatgaaggcaatcattgtccgttacaacccgtgttgccttgggaaaagttggtggaccaactttctactttccagtcatatatggaattggccgggcagcattccggtttgggaaagctttttgtagaccatcaaaaacttattctggaaatcttcaaaaaacatatccgcctttatgacaaaggagccggactgcttttcccggaggacgtgaaacggtatttttcaaattatatcgcggccggttccgttacttgccgcacgttgagggaaaccttgctgaaagagcttgagaatacggtcgacaaggatgtgaaccgctttgaaagcgtcgtcgacgggcggcgaacgtatctgggacatcttattccggctgatgcgccgccacgtcccgatgcatcggcggtgtgggatgatgtgaagaaaagatgggcgcattaatccggcagatgactggcttcgtccggcaggtggccgatgttcgtccggcaggtaacggaagctcgtccggcaggtggcagacactcgtccgtcaggtaagtcctctgcgtgtgaatgattattttaaactattttttaattagaaaaaaggaaaaaattatgagaaattttgccaactatgatgtcgacatccacggtaaatcgagtggagtgctcaagacgatttgtaaaaaatgtcttcctacccgcaagaataagcgcgaccgttcgctacgtgtcaacgtcgacacgggccactgtcactgttatcattgtggcgctgatttttatgttcccgatgatgtggaagagcgcaagaatgccgaacgtgcggtagcccgcaagcgtcgtgcggcagccattccgcagcattttcagcgtccgatgttcgatgtttcgaaaaccacgctttccgaagacacggagcgttggctggtggagacgcgttgcatcccgcagtccgtcatagctgccctacgcatcaccgaacaggaagaatttatgccgcaatccggcaaaaaggaacgttgcatctgcttcaactattttgaaggggggcaactgataaacaccaaatttcgcgctctcccgaaacttttcaaaatggtgcagggtgccgaactgattccctacaacatcgactccattgtggggcagacctcctgcatcatccacgagggcgaactggatgccgcttcttccattgccgccggatttcaaagtgtcatctccgtgccggccggagccaattcgaacctctcctggctcgaccgttttatggagacgcacttcgaggacctggaagaaatcatcattgccgttgatgccgattctgccggaatccggttgcgcaatgaactcatcaaccgactgggagctgaacgctgccgggtggtgacttacggtccggagtgtaaagacgccaacgagcatctctgcaaatatggtatcgccagtctccgtatcgccatcgaacaggcagcggaagttccgctcgaagggatcttcaccgccgccgacttgcatgacgatctacgggctcttttcgacaacggcttcggtcccggagcggaaacgggatgggaggagatggataagatctgcacgtatgaacgtgggcgaagagtctacgtcaccggagttcccggtgcgggaaaatccgagtgggtggacgaattggtgttgcgtctctgcctgcggcatcaatggaaaatcgggttctttagcccggaaaatacccctatcgtctatcatctccgcaaactgattgagaaactcaccggacaccgttttcaaaacggctgtggcatgacggagggactccttgcgaactcggaagattttctgactgaaaacgtctctcatatctctctaaaaggtaatgtttctccggatcgtgtactggccaaggctcatgaactcgttgtccgccgcggctgccgcattattgtcttcgacccgctcaaccgtttcgaccataacccgcaaccgggacagacggaaacgcaatatatttccaacctgttgaataaatttacagaatttgccgtgcagcataattgcctgctcgtggttgtagtccatcctcgtaaaatgaaccgtaatcctgtcacgggcattacccctcgtgtggaaatgtacgacatcaacggctctgccgatttctataacaaagcggattatggtatcattgtggaacgtgacaaggaggttggtgtcacccgcgtatatgtggacaaggtgaaattcaagcatcttggtgtcggtggaatggcatcctttgtctacgatcccgtaagcggacgatacctgccctgtgaagaatctcatgacccttctctctccgctgacctgcgtgtccgaaatacgatgttcgacaactcctgctggctacctgaaaaagaactgttttagggtattaggtattaagtaatacttgacacttaatactttaattagggttcttgtagcacttcgatgatgagccttacttgtgcgggagtgtagtatctggcgcgtggattcatgccggtggccaggagccgttcttttagtccgggtgcagcttcaatccattcgttgaatcggtctactgcgctttgttgcaggatattggggaggtacaacaaggcaagttcgcctttcccataggtgcggtattggaatgttttttcttcttcttgttcggggagaatcttgttttttgttttcatttatagttgtgcttttaggttgttgtatttgaagtaaagttactcatttttagtggaataggcaaattttgagagcggatgttcgggtgaattcataaaagaattcataaaagaattgatactaatagaataccgattcttgaaatttatcgtatctttgtttacgtttcacgttaaaagcatagaaagaggatggaaggaacattcagacgctatccgatagggatacagagtttcgagagactacgcaatgataattgtgtgtatattgataagacagagttgatttatcgtttggctagttcggctaaggcttgttttcttagccgtccccgacgctttggaaagagtctgttagtttccactcttgcagcctatttctctggtaaaaaagacctgtttaagggtctgatgatggaacagttggagaaagactggacggtttatcccgtgttgcatattgatttcagtatcagtaagtatatgaatgcggggatgctgcgctccgctatcaacaatcgcttggtggaatgggaacgaatttacggatgcgacacgagcgaagacactttcagtctccgtctgaaaggtattatcaaacgtgcttacgagcagagcgggcgtcaggttgtgttacttgtagacgaatatgattctcctatgttggatagcaacaacaatgaggagttgcaagctgaaatacgtggcatcatgcgcgactttttcagtccgttgaaagcgcagggagaatatcttcgttttctttttctgaccggtatcagtaaatttagtcagatgagcatctttagtgaattgaacaatcttcagaacataagtatgcaagatgcttatagtgccatttgcggtataacggaaaatgaattgcgtacacagttggaagaagatataagaaggatggccgaggcgaacggtgaaacgtatgatgaggcgtgtatgcatctgaagcaacagtatgatgggtatcatttcagtgaaaatagtgaagacatttacaatccgtttagtttgtttaatgcatttgctcaaaagaaatatgccaatttctggttctctaccggtactcccactttcctgatagacatcttgcagcaaagcgatttcgatattcgtcaactggatggtgtttcggcgactgccgagcagtttgatgcacctaccaatgtcattacagacccgcttccggtactttaccaaagcggttatctcactatcaaagagtatgaccgggattttcagatctatacattggcttatcctaacaaagaagttcggaaaggctttatcgaatcattaatgccggcttatgtgcatttgcctgctcgcgagaatacattttatgtagtatcgtttatcaaagacttacgggtcggcaatctggatcaatgtatggagcggatcaaatcatttttcgcctctatccccaatgatatgaataataaggaggagaaacactatcagaccatcttctacctcctgttccggttgatggggcaatatgtggatgcagaagtaaagagcgctgttggcagggctgatgttgtgataaagatgcaggaggctatctatgtattcgaattcaaagtagatggtactcctgaagaagcgttggcacagatcaatagtaagcagtatgcgattccttatcaggcagatcatcggaaagtcgttaaagtgggagttaatttcgacagtagtacgcgaactattggagaatgggtcattgaaaactagggaatgatcttacatattcctacatatttccacatattccggtataatttgtataattcggtgtaatccgttttaatccggcataatccggtgtagtccggtgcaatccggcaagtcgtcaacgtgttgtcgtatctttgtttcatcaacagaaagggagaatgtacttcttttcgtagaaacaagttatattatggcaacagttacagttgtgcgctacaagcgcagaaaacggctcggtgatgataaatcaccgatgatgtaccttctcaagcccaaggctggggagtcgaaaatctattcaatcgattcactggcacaggaaatcgagtctatcgggtcgctttcggtggaagacgtgtcgcatgtgatgaaatcctttgtccgtgcgatgaaaaaagtgcttgtggcagggaataaggtgaaagtggatggactgggtattttttataccacgctgacctgtccgggtgtggaacaggaaaaggattgtacggtgaaaaatatcactcgcatcaatctccgtttcaaggtcgacaactcattgcgtcttgccaatgacagcacggcaactactcgtggcggggataataacatgatgttcgaattgtatacggagaagaagtccgctgccggaggaaacggcggtgacggctccgatgatgatggtaaaggtgatgggggagaacccggtggtggtagcggtggtggagaagctccggatccggcagcataaaccgctttgattgactctgttctcaatttattaatttatcatctcaatctattaaaatgttagataaaattatcgaaatcatcatgacgattctgccttttctgggcagtagccgcaagaagcgccagatgatggcgcaagaagtgaaagagttcagtgaactagtgaaagaccagtatacttttctgatgcagcagttggagaaagtgttgaaggattatttcgaccttagttcgaaagtgaaagagatgcacgcggagattttctcgttgagaggacagctgacgcaagctgcggctctgcagtgtagcagcaaggaatgtgtgcaacgagtacagatggtcactgaaacggagggatgaatttatgcgaaccatcaatttgattgtgatccactgttccgccacaagggcggacagggattttacggaagatgatttggaagtgtgccaccgtcggcgtggtttcaacgggacgggttatcatttttatatccgtaaaaatggagatataaagaccacccgtgagattgaacgaatcggtgcgcacgcaaaaggacacaaccagaacagtattggcatttgttatgagggcggacttgactgccacggtcatcccgccgatacccgtaccgaatggcaagttcattcaatgcacgtactgattcttacgctcttgcgtgattatcccggctgccgggtgtgcggacatcgggatttgagccccgatctgaatggaaacggagagattgaacccgaagaatggattaaggcatgtccgtgtttcgaggtgaaagccgagtgggatggttagataaaatcaccttcgctacaactatctgtggcgaaggtgatttcgttaaaaagggaagttttgacacattctctttttgatttagttattgctttttggtattttacttggcaaattctttatatattttcagcagcgattctgccgtattccgccatgaaaacaactggctacgttgtatgccatattccacttgttgctgatagagtgtctggtcattttccagttgcagtattttttttgtaatatcattggagttgaacggatctgccagtaaagctccctcgcctgcaatttcgggcatggctgatgtgtttcccgcaatgatgggcgttccgcaagccattgcctccagcatcgggatgccgaaactctcgcgaagcgatggataaaggaatgcgaatgcaccgcaatagagtgctgcaaggtcggtattcgcaatgtatcccggagcgtggatataactcttgatttctgtaatattttcttcttccaatatccggtcgataacatcttccttgaggtcggcaatgagcaatggcagcttttgggtggattgtttcagatagtcgctatatgctttcagcactctgggagtgttcttcttagggtcggtgtttcccagaaaaaatagataattgtctgcatcaatatattttcgggtgatctccggagctttgggttgtacatgaaaatgactattgaaaccgttgtacacggctactaattgttctttcggcagatgcagcacgtcaaggattcgttcacgctcaaattgcgagactgtaataattttctcacagttggccaatacgcgtggtactaccatccggcggtaaaaccatcccatttcctgataccaggtgaagctggaagaatgacgcttttctaaataaataatgtcgtgtagtgttagtattaatggtacgggacattgcaatggggcagtattgcttgtgcagtgcaataaatcgggcatgattttttttactgcgcgtggaagagccacttgttcccaaagggggtaagtggggcattttagttcgataatatgcacattttccgattcttccaagcatctgtcttcaccaggagtaacgaagatgaaatattcgttctcatggtctattttttgcaattcccggatactttcaagagcaacgaaatccattccgtgtttattagtgcggaaaattcgttgggcttcaatagcgattttcattgttgttttcttgttatgtttgatttctatttatggtgttcaccatgctccgtatggataaactttttattggctcctttcaatttaaataagttaccaatcatagtaacagccagcataggcattttggtgattgctttccctacctgtttggtaaatagtctgccgcccggtacgggtagcgtcatggccgctacttgtgcagccgacaatatccaccatttgatggctatcatccattcgttgctgccattgcataggctcaatataaggccgataatggtaaagacaaaggtcaagccgaatactcctgccaactgaatcaatcgtggcggaagcatccattggcatatcttgtcgcagtaatcgaaatttccttgcaaaaatgctttgggtaggtgaggcagcgaagcacggagtgcaccgaattgtgcagctatccagcgtttgcgctggttgctgatggcctctttcttttgcgttttctcgtcgaacacaagcaggtcgggcagataaacggtatagatgcgctgttgcaggagcatggcttccaattctttgtcttcacctgctgtctggagatatttcacgttctgatgaaaccattctgcttcgaatgccattcccgaaccggatagcccggcagaaagtcctacagcgttatgtccgctgcggaagaatccattgtttatttcttcgctggcgctgtcgagcacggaaatgtctgtgttcagattctttcctgtccggtgcgcctgtacggattttatgccgctgtcaaaaacacggttgatggtagacaggaaatcgggcgtggtcatgttgtcggcatccatgatgactacaatgtcgaatgcatttgtatcaatggaatccatggccattgccagtgctttggctttcgaactttccttgtaattcgccatcaacaggcggatgggaagggctgccagagcgtcgtttgtttccggtcgcatctgatcggaaatgactatgatctcatagagttctttcggataatcctgttcaagaaagctctgtatggaagcaacaatcacgcggtcttccttgtaggcgggaaagagcacgacgatgcgtcggagcgtacgtgcttcggggtattggggagcccggtaaaacttggaggcaatagcgtatagcaataggtagcatacgcaaaataccaggggaatgtagagaatccagtcaataatgttcatagtatctagagttttttaagtgtgttattgttagtatctgatgaagacatgaatagccctgtgcagactccataataggtggcacaaaacaggtcgaaacggcctttgaaagcgaatgacagactgtttttgccggctgcaatggtgctctggtaaagtacggacatcaatcgttccatgcctttcatattacggcgggcatagagcaagcgatttcgtgtcaggaaataggtgcgtagtttgcttagttggccggtgctttggctttctttatgaaaaacagtgcaacgcggctcataccatagctcgtagccggcacgggtcatgcttgtgctccagtcgagttcttcgtaataaaggaagaagatttccggcatcattccgattttttcgatcacttcgcgtttgataatcatggctgccccgtgtagatagggggtaggatgggggatatcgtaacttccgtcatcgggacagtcgaaacccagcatattgttgcgcaatgttatctttgtcagcggggtaaatcctgcaaactgtatgtgttgcggcggaaaggcgaaacgtattttaggagacacgcctccgatttccggacgactttccaatcgttccaccaagtaggcgatttcatcggattcgatatatgtatcgttattgataaggaaaatgtatttgccttttgctgcacggatgccaatgttgttaccaccggaaaaacctccgttctcattgctgcggatgctgataaccgttgggtataattcgtgtattttggctgcttcatcttcgcgtgaagcattgtctaccactatgatttcatagctcacagacttcagctttttgtgcagtgattctattagttcacaggtgtctttgaacccgttgtaacagatggtaataaatgatatgtcgggactactgtttgtcattcttgttcgttggtttcgttattagatagctgccgttctttttcttcgctttcttcttttttttcactgatgcgcttgtcgatatgtggagctgcaaaacagagtgcaaagcctatgtatacgggcaactggttgggatactgcataatgtcgttgacataagtggcgataaaaaatccggcatccatacagagccacgctgcgataagtccacgcaggcctttattgcgtactttaaacatgagtatccaggagcaccaggcaaagagaatgccgtgtatggaaaggtagagtatcagtcccacaattcccgtttccacccatacgctgactagccatgagtcgggagggtagggcatttgctctcgtgaatcgaagttaccggctttggagagtccaatgccgtagcctaacggtttctttgccatcaactctttcattctttgccggttttcgacacgcacctggtaggaagcgtcttcggacggatggaaagaggagcgcatcttgtggatatattggttcccgcttccgatattggtataactgaagaacacgaaaacgctgatggatatgaatatacctgccaataacgctttccaatttttggcaatgacggttatcattaacattcctcccatgatgactcccatagctgcacgggttcccgaaatacccattccgtaaagtcccccgacggcgatgcagaggaagtaaatgcgtagccatttggactccacaaagaaggcggagatggcaaagactacagcggacatggcggcatgtactccgtagtttgctgcgtcggagaagcaggaaaaatagcggatacccgaccagatgatatgtgtacgccatccgcccagcacgtgcaggaaatagaggtctttggagctgaaaccatagtttttttgccagtaaccttttatcgtaaagacgaggacgaataccgaccagatgattaatagcagctcgatgtctttttttgtgcggacaacgagcggaacaacaaaggcgcatattaaaggtatcagcgcataaggtgtaaggttgatgttccatgctgccagcacgttgttgggattaagaatttcgagaagatagaagcacaaccagattgtgaacatataggtcatgatgttttgacctgctttccagttggtttgttcatcattgttaagttgtatcaaacagatagtagtaaataacaagataatgatcatagagaataaccctaccttgatatttactaacatacctgctgcaaccaacacaaattgtaaagcaaacaggatatggaaagtcactatcttattattcgtcatcgtcttcttcagtctctttcgcttttctacttagattgaatatgattttttctgtaagtgacaattggctgaaacgatagctgactctgcgtaataaggtatatggcggaagttgtccggtgaaatcttccactgcctcacgcttggcgttggtcaggcacacacggaacggaacatccgttttacccatttgtgtcgtgagctgttcgcaaagttgtttgtcgatggttttccatccgcggtctgccgggctgaccaaaatgttgacattagcgtcgtgcaacagtgcagtcgggatattgcttgacgacaatggcggataggcaacgatcagtatgtcttctccttgcagggtataaaaatcggtaatgttttttgcaagcaggtattgagtagaatctgtgttaaaatcttctccatacgtgatgaatctcgtatttaacatccggctttgcatatatccgcagatcagatttccaacgatgtcttcaccggagttttcgctggtactgaacaggttgatgataaatactccgggggatttccgctttgtcaggaagcggagtatggagttgctcaattctttgatggaaagttggacgtaggttttggctagtccgccataacgggaagaggaggggctgggaacggctcctattaccttaaatccggtcactcgtttggttcggtttgcatcacgcaacgttctgtcaagaatctcgattaataataatagagcgatgattatcagaaaactacctatgcaggcggcaatgacaatctgcttgcggttggttgaattggatgcaatcggataggtcggttcattgagcactttcaatgtagcagaagtcatttccagatttttctttctcaacagggcttcgttgtagctttgtaacacggtcaggtaactgcgttccgtaaagttgatggaacgttctttttgcttgatggtggtacccacaggggcaaaaaatacataacggtcgttcaattcctgacgggcattttgtacaattagtagttcggccttagctttttcaaacaacagagtttgttccagccattggtcgatgatattggtccggctggcgccctctttggtgtatttatgacttacgtaggaagtggttaaatcattcagttcctgtttaagttcgctcaatcgttttttgtcacctgtcagagattcggtatctttctgtttggagtcgctcattgcttccacttccgagattttgctggtgatattggatgcttctcttaatttgtccacaaattccatattcttgagcacttgcttggcattgctgtccatgtgcttctccagttcttcgagcatcgacttggtactgttgtatgcaaaaagtgcatcttgttcccgcagctcgaattctttactgatggccgcgatttctttggtttcgtccagatagttgatgatacgtttttctacgttgtacttggtcaggtcgtcttcctccgagttgagttttttgccgatgcgtttcaactcttcctcaaagtatttgatgactttgtctgtttctccgtagcgaatacggcggtattcttccacaaattcgtccatcaggatgcttaccgtgttgtaggctatgccgggatcgccggaagtatagctgatgtccagcaaatcactcgtgagccggcgttgcactttgatgtttttcaaagcgttgtagctatagaaagggtgattgtagtagaacatttcatagatgtagttaccttttttcggacgcatatatgcttccagattggcaactgttttatcttcgctcgatttgtcgatcagctttaatatttccggtccatgcggactgttttttaagtggttataggtgtaattgtagctggatggggtgactccgtcgttgtcattgtccggatttccctggataagtacacgggcaaataatcgcaggaatactcttttcagggtgctctcggcttgcatgatacttatcaggttgtccatcgaattttgtactgtcgcccagtctgtgcgtttatcgctttccaagttgtatcccgaggctactccggtataaagtgttgctttcacgtcgtatccaccttgcatgtgacgcgtatagtagaagacgagtaacgtgaagatagcggtccctaccagtattagccaacggtggcgaaagagggtccgtatgatagaaatgatgaagttcatatcttagtttttttattttcttatgatgggagtacgtgaaataacctcaagtatcattaagctctttgtcaattcaaacttgctattctcatatgcctcacgtgcagttgactgcctttctttatctacggccaagtcggaagattctatggttccgttggcaaaattcttttcagaaatttcatattgcacattagcaagtaccaaactttcacttctcattttaagtactcttatctgtgaggtagccatcgcatacatctcaataatattcttcttgatttcgtcgtacttcacttcccgttccaattctgcactgcgtaatgtgagcctttgccggctgattttacccttgaggtcgaataggtcgtctaaggggatgcttagaccggcacctactgtgtagccattttgtgcctgggtggagtaggtgaggtatggggcgagtgccacgtccgtataggtggactcattgccgaacattccgtattgatagcttccccgtagactgaagaaacccagaaatgaccatttctctttttggagtaatttgcgctcgattctcgcctttacgtccgccatctcataaatggggctgttcttggcattttcgaataaaacggatagagggggaagtactattttagtataatcttcttcacttagttgagaatagtcagacacttcttgtgcaactacacgagtggtagagacgaacagaagtaataaccccgaaaaaaaacatataaattgcttcataaaaaaatcctattatttgctcttgctgtgttatagcttgcgcaaatataaggattaatttcatttatgtgcagtcttttattatctattttacaatctttcttgtaatttgtgcacaatttgtcgcgtaaatggcgtcaaaaggcttctgtcatgttgaagtagaacaaattctgcttgttcaccatgtctctgccgaagtcaaggcgtacattcatacggggttgaacttcaacgcgtaaccctaatccgaggttgggaagcacaccttctatcttgcccggagtgggtcccatgaatccgcatcctccccaggctacatatcctatatgacttaacatcttttttacccaagtgcttttgtccgtatttatcatctggcggtattcggccatcatgacatgcgaggacttgtcgcgaaactgtcccatgtagtaaccgcgaagatcgaagggggttccgctaagtacatattttgttaggggtacatctccgaatgcgtttttgctttgcactgtccaggctatcactttgcggcgtcctactgttttgtattggcggtaatcgatttccaatcgataaaaattattatcactgccgaataccttgttatacatcattccccgaaagtcgaggtaggttccgctatatgcatttgcaggaatatcacgtgtgtcatacgtcagcaggaaaccaagtccggaactgaaatttttgtatccgtgttctgttcctcctgccgctatatatgagggctcattaaccattccggcagccggtttggtaattttatcatagttcaaatcgacttggggacctgcaaaaatattgctttctcccagacggaacaggaaccaggggtttacttggatgccgctataacggtattcactggtatcttctccacgttcataatctttattagtggaatatccgatgccataaaaattttcgattgtatttttatatgagaaagttccgaagatacggaagcggtcgcctttaaaaaagagctgtggttttgtcatcaggttcaagccgcctttgaacatcaaggcaatggccatcggcactaccgaacgtcgttgggtggtatcactcggattcatccggaatgtcatcagtgcgctaccgcccaccagtaaaccaaaatccggcgtataactgggaccacccaatatgttatagtgtaaattccggtttgccacgcgctggcgacgcagctcgcgctttgaaaggacaggaatggtatctgacgggatgtcttcaatatctgtaggagtagtatcactgatagaagttgtagacctttgcagttcatcgctctttactgccgtactgtcagccgcggctgacatcatattgatggatggaagcatcatcaatattcctattatatatttcttcataatttctctgtgaggaattcgactgcaaagaaaactcttttattccgattagttttgatattcttagataataaatctaaaaaagaatcgtatttttgcggaatatgatgtttttcgatatgctgataaataaaatcgcatgatttaatctcatacatttaaaccgtatttattagtgtatcatgatccgtcagcctattaattaattacttatatcaatgaataaacagattttatcaatttttgttttatgtgctttttcttattctacacaagcgcaagaagtgaaaggaggcatcagcgactccatgatgcaacaaatcaagcagagttacgcaaacactcctactgacaaggctatccgcaacgctatcggtagcaacgacattcgtaaactggctctcaatcaggataacctgaaagggatggacacacatttctccatcaaagtgccttccaaaggtatcaccgatcagaaatcttccggccgttgctggcttttcacaggtttgaatgtgatgcgtgccaaagcgatcgccaagcataacctcggttctttcgaattttcgcaaacttatcctttcttcttcgatcagctggagaaagctaatctctttctgcaaggtattatcgacaccagcagtaagccgatggatgataaaatggtggaatggctcttccgcaatcctttgagtgacggtggaacatttaccggcgtagccgatatcgtcagtaaatacgggcttgttcccaaagatgtgatgccggaaaccaacagtagtgaaaatacttcccgtatggcaggtctgatcgtcctgaaacttcgtgaacaggggcttcaactgcgtgatctcgctgcgcaaggtgctaaacctgctgcccttgagaaaacaaaaacagagatgttgagcaccatctaccgcatgttagtgttgaatctcggtgttcctcctactgaatttacctggactgaatataacgctaagggtgagcctgtgtctaccgaaacttacactccgctttctttcctgaaaaagtatggtgacgaaaaactgattgataattatgtcatgttaatgaacgatccgagccgtgaatattataagtgttatgagatagactacgaccgccaccgttacgacggcaaaaactggacgtatgtcaatcttcccatcgaggatatcaaagaaatggctatttcttctctcaaggatagcacgatgatgtatttctcttgcgatgtaggtaagttcctaaactctgaccgtggtctactggatgtcaaaaactacgactacgaatctcttatgggtacttcttttggcatgaacaagaagcaacgcattcaaagttttgccagtggctccagtcacgccatgactcttatggctgttgatcttgacaaaaacggaaaaccgacgaaatggatggttgaaaatagttggggccctgctgccggttatcagggttatctcatcatgacggatgattggtttaacgaatatatgttccgtctagtagtagaaacgaaatatgcatcgaaaaaagctctcgaggtgttgaaacagaagcctatccgacttcctgcttgggatcctatgtttgctgaatagttctttttctttgcttctgtcttttgttccggaacaaaagataaaagattacgtgcacgaacacgaaaggaattacggatatttttccgtaattcctttcttttttcctcccgaatcccaatcttatttattacttttgcggcaaatttatgaaaccattattttatctagcatggcaaatgtaataaagttacgtaaaggccttgacataaacctgaaaggtaaagctgctgaaacgtacgcaacagtaaaagaaccggggttctacgcactcgtacccgatgactttcctggagtgacgcctaaggtagtcgtgaaagagcaggaatatgtaatggctggtggacccttgtttatcgacaagtatcatcctgaagtgaaatttgtttcgccggtgagcggcgtggtgacgagtgttgaacgtggtgctcgtcgtaaggtgttgaacatcgttgtggaagctgctgcagagcaggactatgaagattttgggaagaagaatgttgcttcgatggatgctgaagcagtgaaaaccgctttgttggaagccggacttttcgcgtttatcaaacagcgcccttatgacatcattgctgacccgacggtcactccgaaaggaatctttgtatccgcattcgacactaatccgttagctccggatttcgagttcgccctcaaaggtgaagaaacaaacttccagacaggacttgatgttcttgccaaactggcaaaaacctacctgaatatcagtgtgaaacagaacgctactgcactgacacaggctaagaacgttacaatcaccgctttcgacggaccgaaccctgctggtaatgtaggtgttcagatcaaccatctcgaccctgtatccaagggagaaacggtatggaccattgatccgcaagccgtaatcttcatcggtcgccttttcaatacaggccatgtggatttcacccgtacagtagctgtgacaggttccgaagtgttgaaacctgcatactgcaaactccaggtaggcgcattgctcaccaacgtgtttgtcggcaatgtaacaaaagacaaagacttacgctatatcagcggtaacgtactgacaggaaagcaagtttctccgaacggattcttgggcgcattccatagccaactgactgttatccccgaaggtgacgacattcacgaaatgcttggatggatcatgccacgcttcaaccagttcagtgccaatcgttcttatttcagctggttgatgggtaagaaggaatatacgttggatgcccgtatcaaaggtggcgaacgtcacatgattatgtcgggtgaatacgataaggtattcccgatggacattctgcccgaatatctgattaaagcaattatcgccggtgacatcgaccgtatggaagcactcggcatctacgaagttgctcccgaagacttcgccctttgcgagttcgtctgctcttcaaagatggaactgcaacgcatcgttcgtgccggactcgatatgctccgttcagaaatggcgtaatcgaataagagattaaataataaaaattaaaataagcgatagttgaaatcttgcgaaacggctctctgtggatacagcataaacccagcacagccaattttcaactctcaactttcaattttcaattaaataaatgaaagcgttaagaaattatctcgataagataaagccgaactttgaggagggcggcaaattccacgcattccagtcggtgtttgacggcttcgaaacattcctgttcgtgcccagcaagactgcgaaaacgggaacgcacatacatgacgcaatcgatagcaagcgcatcatgtcgattgtggttatttcgttaataccggctttgctgttcggtatgtacaacgtaggttaccagcatttcactcacacaggtgctactggcagcttcatcgaaatgtttatctacggattcctggcagtactgcctaaaataatcgtatcatacgtagtaggtcttggcattgagttcgtcgtagctcaatggaagaaagaagaaatccaggaaggattccttgtttccggtatcttgatcccgatgatcgttccggtagactgtccgttgtggattcttgccgtagctactgcattctctgttatcttcgcaaaagaagtattcggtggtacaggtatgaacgtattcaacgttgcgttgattactcgtgcattcctgttcttcgcatacccgaccaagatgtccggtgatgccgtttgggtgtcaggcgacagtatcttcggtttaggacaaagcgtagacggactcaccgttgccactccgctgggacaagctgctacatcaggcagtgtgcctgcattcaacatggatatgattacaggtctgattccgggttctatcggtgaaaccagtgtgatcgctattctgattggtgcggttatcctgctttggacaggcgttgctagttggaagacaatgatttccgtgtttgtcggtggtgcatttatggcatgggtattcaactcaatcggcatggaaaacaacacaatggctcaaatgccttggtacgaacacctcgttctcggtggtttctgcttcggtgccgtatttatggctactgaccctgtgacttccgcacgtacggaaagaggtaaatatatcttcggattcctgatcggtgtgatggctatcgttatccgcgtactgaatccgggttatccggaaggtatgatgcttgccatcttactgatgaacatcttcgctccgctgatcgactactgtgtagtgcagggtaacatcagccgtcgcgaaaaacgcgctatcaagtctaaccaataaataccgaaagaaaatgaatacgaatagtaatagttatactatcatttatgcttcggtaatggttattatcgtagcattcctgctggcattcgttagttcttcattgaaatctacacaagataagaatgtgcagttggacactaagaaacagattctcgctgcactgaacattaaaaatgtggaggatgcggatgctgaatataagaaatatgtgaaaggggacatgctgatgaacgtagacggtacgctgactgaaaacacaggtgaatttgctaccaactacgaaaaagaagcgaaagaacaacaacgtctgcacgtgtttgtatgcgaagtggacggtcagactaaatatgtggttcctgtttatggtgcaggcctttggggtgctatctggggatatgttgcactgaacgaggataaagataccgtttacggtacttacttctcacacgctagtgaaactccgggtctgggtgctgaaattgcaaccgaacatttccaaaacgaatttgtaggtaagaagactttggaaaatggagctatcactttgggagtcgtaaaaaatggcaaggtagagaaacctgattaccaagtggatggtatctccggtggtacaatcacttcagtaggtgtagatgccatgttgaagtcttgcctgaatagttacttgagttttttaactaaataataaggaggagaaagatagaatatgggacaactgttttcaaagaaaaataaagaagtattctctgctccgctgggaattgataatccggtaaccgtacaggtgctcggtatctgttctgcacttgctgttaccgcaaagctggagcctgccatcgtgatgggactttcagtaacggtgattactgcatttgccaacgttgttatttcactgttgcgtaagacgattcctaaccgcatccgcatcatcgtccagttggttgtggtagctgctttggtaactatcgtaagtgaaatcctgaaagcgtttgcttacgacgtaagcgtacagctctctgtttatgtaggtttgattatcaccaactgtatcttgatgggacgtctggaagcatttgccatgcagaacggtccttgggagtctttcttggatggtgtaggtaatggtttaggctatgctaagattttgattatcgttgctttcttccgcgaattgtttggttcgggaacattgcttggtttcaatatcctgaattatgaaccgattcaaaatatcggatacgtaaacaacggcttgatgttgatgccgccgatggcattgattatcgtagcatgcattatctggtatcaacgtgcacgtcataaagaattgcaagaacaaagtaattaattatttctgatttctgaattatgatttatgtctagctttatagtcatagtcgcatgataagtctgctgaatcataaattataaatcataaatcataaatcaaaaagaattatggaacatttattaagtttattcgtccgctctatctttgtggacaacatgatattcgcattcttcttgggtatgtgttcatacctggctgtttcgaagaatgtgaagactgccgtaggactgggtatcgccgtgactttcgtgttgctggtgacgcttccggtcaactacctgttgcaaactaaggtgctggctgccaatgctatcattgaaggtgtcgaccttagcttcttgagttttattcttttcattgccgtaattgccggtatcgtgcaattggtggagatggtggtagaacgcttcactccgtcactgtatgcttcgctgggtatcttcctgccgttgattgccgttaactgtgcgatcatgggtgcctctctgtttatgcaacaacgtattaacgttggtccgagtgatccgaaatacattggtgatatttgggatgccctctcttatgcattaggctctggtatcggttggttgctggctatcgtaggtctggctgctatccgcgagaaaatggcttactctgacgtacctgctccattgaagggcttgggtatcacatttatcacagtaggtctgatggcaatcgcgtttatgtgtttctctggtttgaacatctaaaaagaaaggaataagacaatggatatgaatttaatattagcgagcattggggtattccttgtggttattctgttgcttgttgtaatcttgttggttgccaagaatttcctggtgccatcaggaaacgtaaaactgacaatcaacggcgaaaaggaattggaagtggcttccggttctactttgttgaatacgctgtctgtaaatgggatattcctgtcatctgcttgtggtggtaagggatcttgcggacagtgcaaatgccaagtactcgaaggaggcggcgaaatcctgccttctgaggttcctcacttcagtcgcaaacagcagcaagaccattggcgtctgggctgtcaggtaaaagtgaagggggatatggctatcaagattgatgaatctgtactcggtgtgaaagagtgggagtgcgaagtaatctccaacaagaacgtggctacatttatcaaagagttcatcgttgctctgcctaaaggcgaacacatggactttatcccgggttcttatgcacagattaagattcctaaattttcaatggattatgataaggacatcgataagagcctgattggtgatgaatatctgccagcatgggagaaattcggtttgttaggtttgaaatgtaagaacgacgaggaaacaattcgtgcttactctatggccaactatcctgccgaaggtgaccgtatcatgttgacagtacgtatcgctactccaccgttcaagccgaaagaacaaggtcctggatttatggatgtgatgccgggtatcgcttcttcatatatctttaccctgaaaccgggtgacaaagtaataatgagcggtccttacggagacttccacccaatcttcgattctaagaaggaaatgatgtggattggtggtggtgccggtatggctccgttacgtgcgcaaatcatgcacatgactaagacattgcatacaactgatcgtaagatgtcttacttctatggtgcccgtgcgctgaatgaagtgttctatctggaagatttcctgcaaatcgaaaaggacttcccgaatttcactttccatttggctctcgaccgtccggaccctgctgctgatgctgcaggcgtgaagtacactccgggattcgttcacaacgtaatttacgaaacttacctgaagaatcacgaagctcctgaagatattgaatactacatgtgtggtcctggtccgatgtcgaaagctgttgagaagatgctcgacgatcttggcgttccggcacagaacttgatgttcgataacttcggaggataattcgcggaagagaacaactggtcggaacaatgaccggaaaggttacataaacacagagcgggaaatctgaaaagcagtaatgcttcttcgatttcccgcttctttttggcattatctcataatgtctttccgttatggtttgtatctattttatgtctgttttaaagatagttctccttttttatccgtacttatctattatattcgtatatttggctacacattaaagtacaataggttatggaatatcatcgtatatcttttattcacaatgatacagagtattcatttgtcaaagctatgagttcaagtttaacgggatatgccttggtgacagcttgtagggcagaagtaaccatttacatgaaagagaataatctgaaaggttattatatattgaccggcatggctaaagtttgattgtatttttatctccgtactctttcctttttgtatctttgcccccatgttagagaaaaatgaaattatacagtcggctctccgcaatttgaagattgaggagctgaatccgatgcaggaagcatcacttgaacaagctaccggaagaaaagacgttatactgttgtcaccgacaggatcgggcaagacattggcctatctgttacctttactccttactctaaaaccgaacgacgacagcgtgcaggttttgattctcgttccttcgcgtgagctggccttacagatagattctgtattcaaagcaatggggacttcctggaaaacctgctgttgttacggtggacatcctatcgccgaagaaaagaaaagtatattgagcaatcatcctgctatcatcatcggtactccgggacgtatcaccgaccatttgtcgaaaggcaatttcaaccctgaaaccattgaaactttaattattgacgagttcgacaaatcgttggagtttggtttccacgatgaaatggcagagattatcacccagcttccgggattaaaaaaacgtatgttgctttcagctaccgatgcggcagagattcccgaatttacaggattgaaccgcacagttaagttgaacttcctttcggacgattctgaagaacaagagtcgcgcttgaaattgatgaaggtgctttcgccttccaaagataagattgatactttatataacctgctttgtacattggggagcgcttcgagcatcgtgttttgtaatcatcgggatgcggtggaccgtgtacatcagttattggcggataaaaaactactcgcagaacgttttcatggtggtatggaacagccggaccgtgaacgtgcgctttacaagttccgtaatggcagttgtcatgtattgatttctaccgatctggctgcccgtggactggatattccggaagtcggacatatcatccattatcatttgccggtcaatgaagaagcctttacgcaccgcaacggacgaacagcacgttgggatgcgaccggaacgtcttatctgattcttcatgccgaagagaaacttccttcttatattctggaagaaatggagatagtagtgttgcctgaaaaccctccccggcctccgaaatcggtctgggctaccatttatataggtaaaggaaaaaaggagaaacttagccggatagatattgccggattcttatataaaaaaggaaatctgacccgcgaagatgtcggagcgattgacgtcaaagaacattatgcttttgtcgctgttcgccaggctaaggtgaagcaactcttgaatctgattcagggggagaaaatcaaaggaatgaagactattatagaagaagcgaagtaaagatcttttctgtaagataccttacttgacatctatggataacaaaatggtgtatatatcctgtataaaccaataaaaagaaaggaaaatctgctttaaaacagtatttttataaggaaagatttgtgcggcggaaataaattcgtaaattcgcaaggtcaaaagacaaaagtaacgaaattgttaaaccaaaaacaaacttcaaatgaaaaagcataatttcaatgcaggaccttccattcttccgcgtgaggtgatagaggatacagcgaaggctattttagatttcaacggctctggtctctctttgatggaaatcagccaccgcgccaaagacttccaacctgtggttgacgaagcagaggcattattcaaggaattactcaatatccccgaaggctattcggtactgttcctgggtggaggtgctagtatggagttctgcatggttccttataacttcctcgaaaaaaaagctgcttacctaaacaccggtgtatgggcaaagaaagctatgaaagaagctaaagggtttggtgaagttgtagaagttgcttcctctgctgaagctacatatacttatatccccaaagattatacaatcccgacagacgcagattatttccacatcacgactaacaacacaatttacggtacagaattgaagaaagacctcgattctccggttccgatggttgccgatatgtcttctgatattttctcacgtccgatcgacgtttctaaatatatctgtatttatggtggtgcacaaaagaatctggctcctgctggtgttacattcgttatcgttaagaatgacgcattgggtaaggtttcccgttacattccaacgatgttgaattatcagactcatgttgacagtggctctatgtttaacactcctcctgttgtacctatttatgcagcattgcagacgcttcgctggatcaaagcacagggtggtgtgaaagaaatggaacgtcgtgccattgaaaaagcggatatgttgtatgctgaaatcgaccgtaacaaaatgttcgtgggtactgctgccaaagaagaccgttcacgtatgaacatctgtttcgtgatggctcccgaatacaaagacttcgaagctgacttcttgaagtttgctactgaaagaggtatggtaggtatcaagggacaccgttctgtaggtggtttccgtgcatcttgctacaatgctctgccgaaagaaagcgtacaagctttgattgattgtatgcaggaatttgaaaaacttcattaataatattttcaccacagattatacagacggacgcagattttttttattctgtgagaatctgggtaatctgtggtgagtctttataaacagaattagattatgaaaatacttgtagctactgataaaccgtttgctaaagttgcagtagacggtatccgtaaagaaatagaagcagccggatacgagtttgctttacttgagaaatatacagaaaaagcccagttactggatgcagtgaaagatgctaatgccatcattatccgtagtgatattgttgatgcagaggtgcttgatgctgctaaagaattgaaaatcgtagttcgcgccggtgcaggatacgataatgtggacctggctgctgccacagctcacaatgtatgcgtgatgaacactccgggacagaattctaatgctgttgccgaacttgctttgggtatgatggtatatgctgtccgtaacttctataacggaacttccggtacagaattgatgggcaagaaattgggtattcatgcttatggaaacgtaggccgcaatgtagctcgtgttgccaaaggtttcggaatggaagtgtatgcttatgatgcattctgcccgaaagaagtaatcgaaaaagatggtgtgaaagcacttgattctgcagaagaattgtacaagacttgccaggtggtatctcttcatattccggcaactgccgaaacaaagaactctatcaattatgctctgttgaaagatatgccgaaaggtgctatgttggtaaacactgcccgtaaggaagtgattaacgaagcagaactaatcaaactgatggaagagcgtgcagacttcaaatatatcacagatattatgcctgctgctaacgcagagtttgcagaaaagtttgccggacgttatttctcaactcctaagaagatgggtgctcaaactgccgaagcaaatatcaatgccggtattgctgctgctcaacaaattgtgggcttcttgaaagatggttgcgagaaatttagagtaaacaagtaagattctgaataagtctgccggatttttcaggataactatggtagtatctgaataaaaacaatccgttgcagaatgtcttttttagaaataagtagtatatttgagccacagattttcaagaagtctgtggctttaattttttacatataaaatactaatatcatggcaataatcaaacctttcaagggcattcgtcctccgcaaaacctcgtagaacaggtcgcttcacgtccttatgatgtactgaactctgaagaagcccgcgcagaagcggaaggtaacgaaaagtctctttatcatattattaaaccggaaatagatttccctgttggtatggatgaacacgacgaacgggtgtatgctaaagctgccgagaatttccaactgtttcaggacaaaggctggttggtgcaggataataaggaaaactattatatctatgcccagacgatgaacgggaaaacgcaatacggattggtggtcggtgcttatgttcccgattatatgaatggtattatcaaaaagcatgagcttacccgtcgtgacaaggaagaggatcgtatgaaacatgtacgtgtgaacaacgcaaacattgagcctgttttctttgcttatcctgataatgagaagctggatgttattataaagaaatatacagcaaacaagccggtttatgactttatcgctccgggtgatggctttggacatactttctggattgtcgaccaggatgcagatattgctaccattactgccgaatttgctaaaatgcctgctctttatattgctgacgggcatcaccgttctgccgctgctgcattggtgggagcagagaaagcaaagcaaaatccgaatcatcgtggtgatgaagaatataattacttcatggctgtttgcttccctgcaaaccagctaaccatcatcgattataatcgtgtagtgaaagatctcaatggtttgactcccgagcaattcctggctgcacttgataaaaactttatagtagaagagaagggtgcggatatctataaaccatccggcttacataatttttcactctatttgggtggtaaatggtacagcttgactgctaaggccggtacgtataatgataacgaccctattggtgtgcttgatgttacaatctcttccaacttgattttggatgaagttttaggtataaaggatctgcgttctgataaacgtattgattttgtcggtggtatccgtggattgggagagctcaagaagcgtgtggatagcggtgaaatgaaagtggctttggctctctatcccgtatctatgaaacagttgatggatattgcagatacaggcaatattatgccgccgaagactacttggtttgaaccgaaacttcgttcgggactggtgattcataagttagattaaaaaatatctgtaagatgatgcgaaaatcattgttgatagggactatatcagtagatgtgacgcttgattgatgtagaaaaaatagtgacgggatatgcccgggatagtgacggtatcgttgtggtataccgtcactatttttattggatagcgtcactatttttaattcccccaactgcctatcatcgataagtggaacattaatatttccaaatgatagattgacttttctcattaaagccgtatctttgcaacatgactgctgaagatacttataaaaccatcattgagccttccgaaggtatttatacggaaaaacgaagcaagttcattgctatagcccttcctgtgcgtactctcgatgagataaagatgcatcttgaaacgtatcagaaaaagtattatgatgcacggcatgtatgctatgcttatatgttgggagctgcgcgaaaggatttccgtgccaatgacaacggagaaccttccggaacagcgggtaaacctattctcggacagataaactcgaatgaactgacggatatactgattatagtagttcgttattttggaggaatcaagttggggacaagtggattgattgttgcttacaaggccgctgctgccgaagcgattgctgccgctactattatagaaaagacggtagatgaggatgtgacggtaatgtttgaatatccttttatgaatgatgtcatgcgcattgtgaaagaagaggaaccggagattcttaatcagtcgtatgacatggattgtagcatgacattgcggattcgtcgttcgatgatgcctaagttgcgtgcacgtttggagaaggtggagacagcgcggattcttgatgatgagaatattttgtaggtaaagtattagaagtagtaatagagatagagagtggattgcatgataaataaatgtcacataatttttagtctgtttttaagttcctttgtatggatgagcgttcaggcgcaagcacaaatacaggaaactcaaaaactggctcctaataatattcctgttccgtggtattcgcagaaaatcgcgggatgcccttactcgcattgctctctggcttcttcgttaatggtctttgattattttaagggaatgacggctgatacacaacgtacagcccaggatgcagaaaagaaactgattgaatatcagcggaactactttctgaaaaaacgtgctcctttccgtcgccgtacttcaatagggcagggaggatattattcttttgagattgattcgttgacacgttattatgaaaacatgataagtgccgaacatttccagcagaaagattatcggatattgaaagattatattgatcgtggcattcctgtgcttgtaaatgtgagatatacaggtgcagttcgtggtttgcgtcctggtccgagagggcactggatggtgcttcgtggcattgatgataaacatgtgtgggtgaatgatcccggacgttcgccggagatgcggactaaaggagaaaacatctgttatcccattaagaaacagccgggtaacccttcctattttgatggttgttggacgggacgatttatcatagtcactcccagagaatggatacgaaactccctgtttgcacaggtaggcaagctccctccattggaggaggtgactcatatagttcctccggttgtgtcgtctgtaaccttaccgcaggttatcaatcagtagaagcaactcatagttaggaaaattcagtagtagaattaagatagaacatttgtagtaaaataaagaagaacaaaaatatatggcatttgaagcaaccaaaaaagaatggtgcgaactctattctttctttcgtctcttagcagatggaaaagtagtgttaggcacagcagaagcaaaggcgggagatacattttggcctgttgcaatgattcaacgggaagaacatgatggaacacgtcaatattatattgaagaagatacgattcgtatagaaggagagaatgggagtaagtccatgcctcgtgaagattttggtattgtagctgatctgatattacaggctgtgaaatcttcgccggaaaatgatgttgcttctccagaaggagtagaagagtttttagacgaagctgccattttcgatttggaagcaaaaacagaagatcgcacagatttttccattacattttggcatccgaaagctccgttaagaggtttcaatgtccgttcacggttgggcgtaatgaatccgttgttggacggaggacgtgcagcgaatcttaaactggaacagagtggagtcaaatttgccactccaacagtgaataaaatcaatgctttgcctgaatctccgaatgaagttgccgaacggatgatgatgatcgaacgtttggggggcgtacttaaatacgctgatgtagccgaccgcgtattccgcagtaatcttttgatgattgatctgcattttccacgtgtactgacagaaatggttcgtatcatgcatttggatggtatctcccgtattagtgagttgacggaagttattaaacaaatgaatccgttgaagattaaagatgaactaatcaataagcataagttctatgaattcaagatgaagcagttcttgatggcattagtattgggaatgcgtcctgcaaagatttacaatggattggattcggcagtggaaggtattctattggtggatggaaatggagaagtgctctgttatcataaatcggaaaagcaaataatggaggattttttgtttttaaatacccgtttagaaaaaggatctttagagaaagacaaatacgggttcctggagagagagaatggagtctattatttcaaactgaatgcaaagattgggctggtcaaacggtagaaaagtataatgtattgatgcagttaaactaataatgatggcatacttatataaaatacttgttatccatgaaaacaaatgaagttttagagaacattaaagcacgccgtagcgtacgggcttatactggccagcaagttttagaagaggatttgcaggctattttggaagctgcaacttatgcaccgagtggaatgcatctggaaacatggcattttacggctattcaaaatatggataagttgacagaactgaatgaacggattaaaggggcttttgcaaaaagcgacgattctcgtttgcaggaacgtggacatagtaagacttattgttgctattatcatgctccgactttagtgattgtatctaatgagcctactcaatggtgggctggtatggattgtgcttgtgccatagaaaatatgttcctggctgcccagtctttaggtatcggctcttgttggatcaatcagttggggacaacatgtgatgatccggaggttcgtgaatttattactgctttaggtgttcctgccaatcataaagtctacggttgtgtagctttgggttatcctgattcgaagattccaataaaagagaaaaaggtaaaggctaatacaataactatcgttagatagaatacagcttcttgtctgataaaataagaggctgtgtcgaaactctcatataaaaatcaccctcgccacagaaagttgtagcgagggtgatttcgataaaaggggagttttgatacatccccttatttttgtgaggtgattctttaagagacagtgctctgtaaatctctttggatagacctctttttactcgaaagtaccatagcgagtgggtagtagcttacggtctcccaaggtgttatctacgcgagctacatttatccagaatttattatcacgtacactttctataggataagctgctttctcgcgtgtatatgagtgctcccaacgatcacttacaatttcatattctggatgaggagcattaatcaatacattatcatctttatccgcttcgccattcttcacttcttgaatttctttccagatattcagcatgacatctacgaaattgtctagttctgccagactttcactttctgttggttcaatcatcaacgtaccgtggacggggaaggagagggtaggagcatgataaccgtaatccatcaggcgtttggcaatatcattctccgagattcctgcttcttcatgtactttccggcattccagaatcatttcgtgccctacgaaaccgttggctccccgataaacaactccatacgtatctttcagacaagtagccagataattagcgttcaggatcgcaattttagttgcctgtgtcagtccttctgcacccatcatgcggatatatccgtatgtgataggcagaatacctgcactgccgaatggagctgccgatacttgattttgtgaattgccgaagattccgtgtccgggaaggaaaggaaccaaatgttcggctacgcagataggaccgactcccggacctccgccaccatgaggggaagcgaatgttttatgaagattcaagtgacagacatctgcaccgatgaatcccggattggttaatcctacctgtgcattcatgttggctccgtccatatatacttgtgcaccacaggcgtgaatgatgtcgcaaatctcttttatctcggtctcgaagataccatgtgtagaaggataagtaatcatcagtgcagccaattcatctttattttcttcagcttttacacgtaggtcagccatttctacattcccctgctcgtcgcatgcacaggtaacagttacgaagcctgcctgtatagcagacgcaggatttgttccgtgagccgaagctggaatcaagactttgttacggtgtccctgaccgatactttcgagataggtgcgaatcacacgaaggcctgcatattctcctgcagcacccgaattgggttgtaggctgacccctgcaaacccggtgataactttcaaatcttcacttaggttcttgattaattcacgataaccttctgcttggtcttccggaaccagcgggtgcatacccataaactcgggacggcttaaaggcaacatttctgcggctgcattcagcttcattgtacatgaaccgagggaaatcatggattgtgcaagagaaatatctttgcggtccagacgtttgatgtaacgcatcatctctgtttccgtgtgatacttgctgaatacttcatgtgtcaggaaaggagttgtacgttttaaatccttgtcgatgttgcttctttccggaatgtcgtctactttctggtaatcttttccggcggcaatggcaaaaatcgagagcaacacattggcagctgccacatctgttgtttcgtcaatgctgaaaccaacattgccattttcataatagcgcagattaacttctttggtaagtgctatcgtgcggatttgctgtgccgaaacgtgttcgggcaattcgaaacgtaaggtgtcaaagtattgagcgttgacttgtgtatatccgcatttctttaattgcttttcaagaaatacagtaatgctgtgtatacgtgatgcaattgtagtgataccctcctgaccgtgataaacggcgtaaaagcctgccatagtagctaataatgcttgtgcggtacagatatttgaagttgctttttcccgtttgatatgttgttcacgtgtctgtaaagccattcggtagcagagtttgccatatttgtctttagaccatccgatgattcgtcccggcatattccgtttgtattcgtctttggtagcaaagaaagcagccgatggaccgccatagaacattggggtacccaagcgttgtgtggttccgaatacaatatctgctccccattctcccggaggagttagcagggcgagacttaaaatatcagcggcaacagctactttgcagtctgcggcatgtgctttttcggtaaattcagaatagtcctctacgtttccatgtgagttcggatattgcagaatacaggcaaacacttccggtgaaggttcaaaatctttatatttacctacacgtagttcgatgccttgaggtacggcacgtgtagtcatgacagctaatgtctgcggaaaaatattctcgtctacgaagactacgttcgcattggctttctgttgcgcgcgggagcgtaaggcatacatcatgcttacggcttcggcggcggcagttgcttcgtccagaagtgagcagttggcgagtggcatggcagtaagatcacatacggctgtctggaaattcatcaatgcttccagacgtccttgcgatacctctgtctggtacggagtgtaagaagtataccatactgggttttcgaatacattccgctggataacggccggagtgatcgtgttgtaccatcccaaaccgatatatgtggtatatagtttgtttttagctgccagttcagcgatgtgttttccaaattcgtattccgtcagtggactagtcaatgcaagcggctctttcagccgtatattggcgggaattgtctgattaatcagttcgtccagtgagttcacgccaattttgcggagcattatggctgtatcttgttcattgatgccgatgtgacggctagctaacaaatcggttttcataataatcaagtattaaattaagtattaagtatcaagtattaagtattactgcggttaatgggcgattagccttgttaatacctaatacctgatacttaatacttcttttttattatctaaaaaatgggttttcagctttttccattccgatagtcgtgggagcgccgtgtcccggataaacgactgtttcgttgggaagaacaaataaacggctgcaaatatgttctatcagttcatcgaagttgcctcctgtgagatcagcacggccgatgctgccttggaacaggacgtcaccggagaacatgcagttgtcttctttgcaatagtacaccaagctgccgggtgaatgtccgggcacgtgtattgcttccagtttggtatgtccgaaagtgatgatatctccgtcatgcaggtatttgcccagtggtacaggttcttcctgcaactgaaaaccaaacattctgctttgtttcggtgcttcgtcaatccagtactcgtctgctttgtttgcttctgccgataacccgaattctttcagcatgaacggatttccgaagatatgatctaggtgtaaatgagtattcagcagatgctttacattcagttcattggtaagaatgaactttttcagtgcctgcttttcttcttcatagaaacagcccggatcaattacgactgcttctttagtgtcatcccataatacgtagcaatttacgggaaacatattaaattcaaatctttttattttcatggtttctctatgatttatcatctatcagaacatatagtcttgtttaaatcggaacatataccactttttttgttttaaagaactcttcctcgaagttgtcgctcaagctatgaatgaccgttttatgtttgaacggcattgtttcatgctccagttcaccgcctttgagacagataagtccgttgggcaatgcattctgttgtttcgaagagatattctttttaataatcttaatcaaatccgccaaaggcattacggcacggctgacaacaaagtcgaacgttcgtttctcctcttctgcacgggcatggcggaaagtcacatttttcagtccgatggcatttgccacttcggttgctacacgtacttttttgccgatactgtctacgaggtggaattttacctcgggaaacaggattgctaaaggaatgccgggaaaacctcctcctgtacccaagtccatgatgctggttccggggcggaattggatgactttggcaatgcctaatgaatggagcacgtgatgctcatataaattctcaatgtccttgcgggagataacgttgatttttgaattccagtcagtgtagaggtcgtatagagctgcgaattgtttgcgctgctcttccgtcagatcaggaaaatatttcagtatgatttccactgtttgaattttgaattataagttttgaatgatagatgtggatgaatatcctattctgtcacatggaagtgataacaacaggatattcattggtgttcagctttttatgatttttaattttttagctctcccagaatcgggttactgcctaatagatgttccatcatagcaaatgggattgttacctttacaggtcccatagaataaggagtgatatcgtatacattataatagaaggtgattccttctttgcttagatagaaattttctgtcggagcgatgtccccggtggaagcatatcccatatcttccaatgcttcgtgagtggtcactttgttatctgccatgagctgattccagatcaggtcggtcaatgcgtctttgtagtctccgacaaaaatatcatcgaggcggagcggacgcatcagggtgaggtccatatttaaataagttgccatgtaaattccatgtgcacctccggtatattcgttatagtcgatgcgatatacaagtagatctttatcatacagttgcacatggctttctatacctttataataagaataccaggcaccgatggaagattcgtcttccttgtctttctcatcttcggtatacataggctcgagatcgcgacggtattcgctgatataattctcggtatattgctttacaacttcttccggtttttcgccgatgtatttatctccgaaacaggccgaaatgaaataagtattcagactgtctttcagcatatcatccgatgattttatcggataagcaaaattaataataatattgcaggccggtttggctgtatcattgaagaggtgagctgtcttattcacttgaatgctatcaaactgtaacgcacctgtgtttttgttcatcttgtcatgacaagaaaacaaaaagccgcttaccgaaagtataattgcaagcagactgacatattgttttttcatacccattttttctgtaaattcaacatttgttttatcattcactattgacaaatatagatgaaattcgtgaatcgggctaataaaaacagaaaaaaatgcagctatttatccccaaaaatgggattggcggatattatccgccaatcaatgcttgcaaactttagtgatatctactgtgaatccatcttcagcaggcataaatttccctttcattttcagaaattcgataagggtatctacatccatgttttctgccgagcaagcataaaaacgttgctgtgagccaaacttcttaatgattgcttcccgcaatgatgattccgagtagctatttccttccatcatgtggaggacttcatgagcatgtaattgttccataatcttttttctgcaaagatagggcagagattgcttggaaactgtaacatatgtgacaaaactgcataatattcattgaaaattgaaaataaccatttcactatgcgttcctattctgaagggtggtccccaaagagacaatccggaagatacatacacgtgactgtttccccattggcgataaccgtggctttgctcgaagatataatcggtcacccaattaataggccatatttgtccgtggtgtgtatgcccactgaattgcaggtcgatgccggcagcttccgttttttccaaatcaaaaggttgatgatccaataaaatgataggtttgcttttatcgatattcaccattaactcttgcagggaatgacgcttgcggttatgacggtcatcacgtcctatcagttgtatgccgttgggaagtgtaactactgaatcgcgcaataattgtatttgagtgcttttaatatatcggatactttcatcgataccgctaatgtattcgtgattgccgagaaccatatagatacccataggagctttcaagttagctaattcttccgccatattctctgtataaagaggtacgacgctattatcaatcaagtcaccactaatcagtatcaggtcgggatgctgcgcatttatcatttccacatatttttttaatgcggctttccctgtaccatttcccaagtgaacatcgctgattgcgacgattttaattgcttggggagtatcttcatatcgtttattggttaaaatgctgactacattggtttccgggtgatgatagttatataccccacatcccagcaatcccaacgtgaacactaaagacagatagaacctatatttgtagacaactttgaataatttcaagatatcaaacaaaagcaagaataatgccatgtatagagtaaatatcaaccaacttgttccaatggtgtacattgaatgggagataaagacaggcatctcaaggttacgagttagcatcgtgccgaaaaaggataaagcacatatccagaataaaacggtcaggaatatttttactccgagagatttaactttcagagcttgctttgctctgataaatatgtaggcattacctgccagataaagagtgataatgatgagtaaatatgtaagcatagcgtttacttaaaaatcagagaatttattggggcaaagataggttttattgttgagtaaaaagagttaatagtgctgatatgactctaaaatagccaaataaaggaaagagaatgtgtctgtatcggattgattgaatcttaattacgaaaaattataggaaaatctgtttttattcttatctttgtcctctgaaatgaaaaaactagcctacataacagcacttatcctttctctcctgattatctattcaggaggtggagtctctattgtgcattattgctgtgtccgttgtgaaacggtgcagagctgttgtgatacaggctgtccgaagtgtaaaaagactcatacttgtgattcaaaaaaaggttgtaaagataagggttgtacagctattatctataagcttgatttgatgaaacatactactgaactgacaacatcagctttagtagtcgatcttttgtgtgagcatttttgctatctgttgactccgacctatgcggataaatcggtagaatatgatagtctgacctctccgccacctctctgttcgaggcagaagctggcgctatattccacttatattatttagccactatttctttcttatttaatcctttgctttcaatagaacatgaaagtaaagcagcactgaatgcaactaagttgcatgagaaatgaattaattttgtatctcgaaagtaactttagaaagaatgaaatatatgataataggactgttcctgttatttgccggtaatatatatgcgcaagtacggggaacagtgaaagatagtaccggggaggctattccgggtgccaatgtgttctggatgaatacaggacaaggagtgacaaccaaagaggatggtagtttttctatcactaaaccttccaaaagccacatgctgattgtcagctttatcggttttcagaacgacacgattcatgtgagcagtaaaaatcaacaactggatattgtgcttcgtgatggagtggagctgaatgaagtaaatattgtcactcgtaaactgggaacgatgaaattgcgcagtagcgtgatgaacgaagacatgataagcagtgccgaattgagtagagccgcttgttgtaacctgggggaaagttttgtgacgaacccttcagtagatgtgagttattccgatgcggcaacaggagccaaacaaattaaattgttggggctgtccggcacttatgtgcagatgttgacggaaaacatcccgaattatcggggagccgccgctccttatggattgggatatgtccccggtccgtggatgcagagcatacaggtttccaaaggaacatcttcggtgaagaatggttatgaagccatcacaggacagataaacgtagaatttaagaaaccacagttgccggaagccgattgggtgtctgccaacctttttgcaagcactaccaaccgatatgaagccaatgcggacgctacattgaaactttccaaacgatggagcacttctctgctggcgcattacgaaaatgagaccaaggcgcatgatggcaacgatgacggatttgtggatattccgcaggtagaacagtataatgtgtggaaccggtgggcatacatgggcgaccattatgttttccaggcaggtatcaaagccctttctgaaacacgtaccagcggacaggccaatcatggagggacaatgcactccggtgacctgtataaagtagggatcgatacggagcgctatgaattcttcaccaagaacgcctatatctttaataaggagaagaatacgaatctggctttgattctttccaccactttacacaatcaggatgctacgtatggacgcaaactgtataatgtggatcaaaccaacgtctatgcttcgctgatgtttgaaacggaatttaatccgcaaaatagtttctccgcagggttgagcttcaattatgacgcttatgaccaacattaccgtttggaaaatacaacggacaatccgctcaaagcctttgaaaaggaagctgttcccggtgcttacgtgcaatatacgttgaacctgaatgataaatggatggtaatggccggtctgcgtggtgattacagtaacgaacatggtttcttcgtgactccgcgtgcgcatcttaaatacaatccgaatgaatatgtgaatttccgtctttctgccggaaaaggatatcgtaccaatcatgtgttggcagaaaacaactacctgctttccagcagccgtaaggtggaaatagcaaagaacctggatatggaagaagcatggaactacggtgccagcgtctctacttatatccctatattcggcaaaacgctgaatgtgaatgcggaatactattatacggatttcctgaaacaagtgatagtggatatggatagcaacccccatgaagtagctttctacaatttggatggacgctcttattcgcatgtgttccaagtggaagcaagttatcctttcttcaaaggattcactctgacaggtgcttaccggctcacggatgcgaaaacgacctacaaaggtgaacgaatggagaaaccgctgaccagcaaatataaaggactactcacggcttcttaccaaactccgctgggaatatggcagtttgacgctacactgcaactgaatggcggcggcaggatgcctactccttatgaactgggagacggacagttatcctgggaacgtcgttatggcagttttgaacagttgagtttacaggtgacccgttacttccgccgctggtctatctacgtaggaggcgagaacctgacaaacttcaaacaaaagaatccgattatcgatgcggcaaatccctgggggaacaactttgattctaccatgatttggggaccggtgcacggagcaaaaggatatatcggaatacgttttaacttagctagaaatagcgagtaaaaacgggaaatagcgaatgaaagaaacgatcgcataataaagaatattaattttaaactgataagaaaaatgagaacaaaaagatggatggccacttgcgtggtggctcttttgagtgtaacagttgtattggcaaaagatattcgtgttgttgtatttaaagtgtcgcagatgcactgtgagaaatgcgaaaagaaagtaaaggacaatatgcgttttgagaaagggctgaaggatatttcgaccgaagtaaaaacgaaaatggtaaccattacgtatgacgctgaaaaaacgaatgtaaagaagttgcaggcagggtttaataagttcagttatgaagccgaatttgtaaaagaaacaaagaaagacgatcagaaggctgataagaagtaattgaacaaatacctgtattagcttgtttctataaacaaacaagggttcttccccaacttctttttgagaggaggggaaggccgtaaacaataattatatgggtaacacaacaaaaaaggcatttcctgtgcttaatatgcattgtgcaggatgtgccaataatgtagaaaaaacagtaaaaaaattgccgggagtcattgaggcttccgttaattttgctaccaatacattgaccgtttcttatgagaaagagcagctgactcccggagagattcgtgcggctgtgcttgcggcaggttatgatctgattgtggaagaagcccacaaagaagaacgccgggaagaggaacagcataagcgttacactcgtttgaaatggaaggtaattggagcgtggattttggtagtaccattgttggtatattccatgatactgatgcatgtaccatactctaatgagattcaaatggtacttgctatccctgttatggtctttttcggaggtggtttcttcaccggagcctggaaacaggctaaattaggacggagtaatatggatactttggttgcgcttagtacttccattgcttttctgttcagtctgttcaacactttcttccccgaattctggtatgaccgcggattggaaccgcatgtctattatgaggcttctgcggtgattatcgctttcgttcttaccggaaagttgatggaggaacgtgccaaaggaaatacctcaacagccattcgtaagttgatgggaatgcagcctaaagcggctcgtgttctgcgcaatggagtggaggaggagatcttgattgaaaaactccaggtaggtgatttggtggttgtacgtccgggagagcaaatacctgtggacggtcagctttccgaaggcgattcgtatgtcgatgagagtatgattagcggtgaaccggttccggtagaaaagaagaaaggtgataaagtattggcaggaacgattaaccagcgtggttcatttatcattcgtgccgcacaggtaggcagtgaaacggtgcttgcccgtattatcgctatggtgcaggaagcacagggcagcaaagctcccgtgcaacgcattgtcgatcgtattacggggatttttgtacctgtcgtattgggcattgccattcttacatttgtattgtgggtcaccattggtggtagtgaatatatctcttatggtattttgtcggctgtttctgttcttgtcattgcttgtccatgtgctttgggacttgctacacctactgcattgatggtgggtataggcaaagctgccagccagcatattctgattaaagatgcagtggctttggaacaaatgcgcaaagtagatgtcgttgtactggataaaacgggaacactgactgaagggcatcctacagctaccggatggttatgggcgcagtcgcaggaaccacatttcaaagatgtacttttagctgcggaaatgaaatcggagcatccgcttgccggcgctattgtctctgcgcttcaggacgaagaaaaaataaaacctgccgcgttggatagctttgaaagcattacgggaaaaggaattaaagcctcgtatgagggacatacttactgggtaggcagtcataaactcctgaaagatttcagtgcgacagtaagcgatgtgatggctgaaatgctggttcactatgaatcggacggtaacggcatcatttactttggacgtgaaaacgatttattggctattattgctgtttccgaccctataaaggctacttctgccgaagcggtgaaggaactgaaacgccaagggattgacatctgtatgctgacgggcgacggacaacggactgcactagccgtttcttcccgtttaggaatcgaacgttttgttgccgacgctctaccggacgataaggccgaatttgtacgtgagcttcaaatgcagggaaagaaggttgcgatggtgggcgatggtatcaatgattcgcaggcactggcattggctgacgtcagcattgctatgggaaaaggaactgatattgctatggacgtggctatggtgactttgatgacatcggatttgttgctgcttcctaaagccttccagttgtcaaagcagacggtcaaactgattcatcagaatcttttctgggcgtttatttacaacctgatcggtattccaattgctgccggtatcttgttcccactgaatggtttgttattaaatccgatgctggcaagtgccgcaatggcgttctccagtgtgagcgtagtgctcaattcgttgagcttgggacgaaaatgagaaatgaactataaaaagacaggaacctgtaagctgtaaacgatgaatggcaagctgtcatttatgaacagcgtaaataatagacggtgaatactttgcggataatgcgcaatttattcaccgttcattgttttgcatctcaccatttatgttttctatcgtccttcgtgaaaattatctgtttctaaagtccaatggtgtcattcctacatatcgtctgaaatatttgccaaagaaagaggcgctggggaagtttagagaatatgctatctcttggatagtcatattggtacctttcagtttggctttagcatccatgataacgatataagcaatggtatccaaaacacttttacctgtcacttgtctcacagtcgtgcttagatgttgaagagatatacctaatttatctgcgtagaactgtgcacgacgttcatttttataattctcggtgatggcttgaatcagttcccggcagatttcctttttgcggttcgaactgctgttttcgcccggaaatttatgatatatcagtcgtatgcttgtcaaaatggtctgaagagacaattcgaccaattcagaatccatttcgaagttctcattgcaactggcccgtgataatagagcaaaatagtctttcagataactggctacttcttcattaagaggaactaccggctgttctatcagtttgggatatgcgttaccaatattcttcatgagattgatccgtccggcacaatgagcagagaagccggcaaagcaaaggcatactttttctgttctctcccgaaactgaatgattgttcccggtaataatgttattaagtcattggggtgaatttcgtaatcaagcagattgatggaggctttcatcgaaccttcggtacagatggcaacaatacatgcttgcaaccgacaagattgcttgtaaatattgagaatgtcttctgttacattcgtccatgctaatacttcggtaggcaagtctacctgtggaaagtccattttcatagttgtgtgtgttatattaggccaacaaatgtacgcattttctttttatttcttacctttgtttttatgaaaacagtttttattgattggaatttgataccatacgccgaagcatggcaacggcaaacagaatggtttgataacattgtccgggcaaaagttcagggcgagagttatgaaaaccgtattgtgatgtgcgaacatccccatgtttatacattaggacgtagcgggaaagaaaataatatgttgttgagtgatgaacaactgaaagcaattgatgccaccctttatcatattgatcggggaggggacattacttatcatggtccgggacaactggtgtgctatccgatattaaacctggaagaatttcagttaggattgaaagagtacgttcatctgttggaagaagcggtgattcgggtatgtgcttcttatggcattgaagccggacgtttggagaaagcgacaggagtctggttggaaggtgatacgcctcgtgcgcgtaagatttgtgctatcggagtgaggagcagccattatgtcacgatgcatggactggctttgaatgtgaataccgatttacgttatttcagttatatccacccttgcggatttatagataaaggcgtcacttctcttcgtcaggaactaaagcacgatgtgccgatggacgaagtgaagcaacgcctcgaagaggagcttagaaaactattccaactcccagttgccaggtgcggcgcataaagcaatctttatcagccaaggcgtatgagaagtctgcacgtatcggccagaagtttattccgcagcctagagtgccgtagttgcctactcctttgtctttgtctccgaaatgatatcccgcacggacaacagcatatttcaggaaattatattcggctcctatgccagcctggagatgacggatttcagaggggagcagatagttgaagtcgagagccacctgcaaacggttttctatgctgaatggcaggtcgattgtacctcccaatcctaatctggcgggtaacttttgtccgtccagctttttgcctaagttggcagcttggaaaccaatgctccaggaagccatttcgtccaatagagccatattgcgatagtaggtcgcgccgaagtccagacaaacgctattcttgctgtctgcgctttccgcggctttggcttgcaggtatctgaacgttaatgaaagagacagatttttggctacatttctgaaataagcagcttctaagtcccatacgtgagggcggtaatcgagcaccttgggatctttgaaatgccggaaacctacagcaaatccatgtatgccttcccttccgatccggtagaaaagagaggcgctatgtagcgcataatcttggttgatcttagcgtatgaataactcgcacccatcacttcttgtgagaaagcgatggtagaagcattatgaaaaatagctgtactaccgttatcggtggtagctaatcctgtacctgccatacctgccgattgggcgtctggagtaagttccagaaaataggcgcttgccatttcttgtgctcccagcaaagtggggaataagcacgaggcgagaaggaaatgttttactcgtttcataatcagttatttttagagtgagacatccggacaacacgtatgcctgtccacgatttattgttgtttagcatgtgattgagaggttcgtcgctgacaactacttttcccaatgtagaagaagcgtgcagcaggtgcagttttccctctttatattctgctattcccacatgagcaatgtccagtccgggcatcttcgttgtaatagcaataatgtctccattcatgatccagggcaatccggcttccggcagttcgcttttcggcaaccaatgtacgacttttccggagattgctttttcatattcggccatttgtcgtacattttccggcgaatcagccaattttttatattgcttgggatgggtagacatatacgaaagagagattttctgggtatgcgcactgtttttggcagtaatatcggtgaggaatccgtggcggattccgttctctatccattcggaagtataatgcaaccgggaaggataaccgttgatgatgccgtcccgataacgtattttttgcagattgtcggcaaaggaagagccgagtgcctgtgccaacgtgtattctacgaaagtgaggcaatctacggcatcagtccggatcactaatgattcttctccgtcttgatctaatgtgttagccacgtatttagttcccaggtaagatttcccgattcgtaacatgggttcggggttttccgggaatacaacgccgtcgcgcaaccatttctccaattcctgtgtccattgttgcttatatttaaaatgatcctgaaatccccagccatgtcctccggtaggataaacatggagagttgccggaaccttgtttttctgtaaagcaaggtaatagtttactccgtggtaaggtgctacggaagggtcatcggaggtaagagcgataaatgcttgtggagtatcgggcgttacttgcaattcggcggaaaacttctgtatctgttccattgtgggatttttgccgagcaatgcagttcttgtatttccacgggtgacttgcatcatcgtaactaccggataaagtaatatctgaaagtccggacgtgtttccgaattgtagtgagtggcaagtgtagcagttaaatgccctcccgcagaggctcccattaatcctaccttgtaaggattgacattccattctttggcatgttggcgtaccatgcgaatggcttgttcggcgtctgatacggggacttcccaatgtccgttcggcatccggtattttaataccatataggtaataccttgtccgcagaaccaaggggccatatcatacccctctccatccatacccaatccacgatacccgcctccgggacacatgataatagccattccattcggcttttccgggtggtagaccgtcagggtgggatgcgtgacattcgtgacaaaatgaggacgcgtttcctgctcctctccggttagtccactggagttgggagcaccgtcgggccacaaaggtagctcgacgggctgctgcgcaaatgatatggcagttacaagtgatactataatggataatagtctcctcataatgatttatttaactttcattgaagcctttataaagtaaagaatcagtaaggcatacgctcctaatgccaacacttctgaccaagtattgttcaaccatgcctcattaaccagattgattccaccaaagcgcatcgcggcactgattactcccatcaatgcacctccggcaatgaaaccggatgccagtaaagttcctttttcacctctttccgtattcagagatgcgtctttgctacgtgttgtaacaaaccaattcactgctccacccactaccagcggcacattcagttccaatggaataaacatacccaatgcgaaagctaatgcaggaattttacaaagagtcagaataatagctaagacagcaccaatgccatatagcaaccagggtgcacctacaccgctcatcagcggttcgataacggctgccatcgcatttgcttgcggagcagccagtgcgccacttgtaaatccgtatgtcttattcaggataatcattacaccgcctactgttgcagccgatacgattgttcccaagaacttccatgtttcctgtttggcaggcgtgcttccgagccagtaaccaatcttcaagtcggtgataaaacctcctgccatcgacagtgcggtacatactacaccacccattaccaatgcggcaaccatgcctgaaggacctttcagtccgacagctaccatcactacggaagccaaaatcagcgtcatcaatgtcattcccgaaaccggattagtaccaacaatcgcaatggcgttagctgctactgtggtgaacaggaaagagatgccggcaaccaaaacaatggctaccaatgtatgcaacagattcccttgcatgacatcgagatagaagaataatacgattaatatcagtgtgatgatggaaccgatagcgataatcttcatggaaagatcccgttgggtacggataatgcttttctctacattccctttaccgcccatctctttggctgccagtccgacagcgctcttgatgatgctccaggaacggataataccgatcacacctgccatagcgataccgccgataccgatgctcttggcataatatttgaatatttcttccggactcatcatacctacggtagaggtgatttccggattccatgcattcagtacactgtcaccccagatagcagacattcccggaatgataatccaccacacagccagtgaaccggcacaaatgatggaagcatatttcagtccgacgatatatcccaaaccaagcacagcggcaccggtgtttaccttgaatactaattttgccttttctgccagcatttctccggcactgcaaacacgggtagtaaaattctcgttccaccatccgaatgtcgctacgatgaagtcatataatccgccgatcatacctgccatcaataacggtttggcctgactgccgcctttttcgccggagatcaacacctgtgtagtggctgttgcttccgggaaaggatattttccatgcatgtcgctgacgaagtatttacggaaaggaatcaggaatagaatacccaatacgccacccaataaagagctgatgaatacctgcatgaaggtaaccgtcatctcgggatatttagcttggagaatataaagagcggggagggtgaagatcgctccggcaacgattactccggaacaagctccgatagactggataatcacattttcgcccaacgcattttttcttttggcagctccggaaactcctacggcaatgatcgcaattggaatagctgcttcaaatacctgtccgaccttcaaccccagataggcagcggcggccgaaaaaaggattgccatggcaataccccatgctactgaccagatattaacttccggataatttttagagggacccatcaacgggttgtacacttccccgggtttcaactctctgaacgcattctcgggtaacccggtgaatttgtcttcttcttgtttcatagtttttataatttgctaatgtgttaatttacatttccgtcctcaaagtaaacaaaaaaaaaggagaaccgaaagattctcctttatgtaatagtctattttttcctactttgcatcttttgccgtcatatcgccttcgatatacaatcttaccatctctgttttggcgttggtacgcaaggtgattgattttttgaaatgtcccggatatttgcctgttccgttataagtcaccttgattgttccttttttgcccggcatgatgggttcctttgtatattcgggtactgtacatccgcaagaggctacagcctgatggatcaccagcggggcatcgccgatattagtaaaggtaaatgtgcaactgacaaccgggctgttttcagaaaacttaccgaaatcgtgagttgttttgtcaaacttgatatctgcatttgtttgtgcaaatgcaaagcttacgcccattactaacagggtcattaaaaaaagtatctttttcatttttccttctctttttgattacaaacaacaaagataatgcttttcccctaaaatatactttatggagtgcgaaatagtattaaacgattctcttttgctattttgagagctggaatccgagcatcattccatcgtaattttcggccagtgaactaactgttttcagtgcggtactgctacttttgctaccgatgaaagccattagtttcaacagtttgtccgagttgaacagtaactccagtgagctggaactgcaatttactttagcgtgcagattcagaagtttcaaatacttcaaatcaacttgtttggttgaagcattgtaggagtaagtgcctttcaatgttttcttgcccaccgtgctggtgaaagtactgtcggcattgaaagtgaaactcatctggccgtctttaatacctattttgcttaattgttcgttcagcttattttcagccatagtagctgcggcagctccgcctgctttcattagtaagttatccgattcgaactctaccgccgaacctttgtagctccatgttccggtcatgtcgatagattcggtggttccggtgatggcatttactacttttgaaatgttgtccttatttaataagtcggaccatgattgcgcctggctgttagttgccgttagcataaatactgccaaaaaggcaatagataaaaaactctttttcattttcattcttctttcatttaacattgagatccttgtttatgttttctatgtaattgagtatatcaacacgtcctgtgcggtcttccgaggaagatacgaagtgaggagggagctcttcccattgtttgcccaactcacgtaaataggcattgatattcatttttaaacgtccaccttttagcttgtcggctttggtaaagatgatagagaaggggataccgttctcgcccagccattccataaactcgaggtctattttttgaggttccagccggctgtctatcaggacaaagaggttggtcatttgttcccgttccaagatataatcttcgattatggtgcgtatctggtctttccctttttgtccgcgtcgggcatagccatatcccggaaggtcgacgagataccaattcttattgataaggaagtggttgattaacatcgtttttcccggagtagaggaggtcatggccagacctttacgactggtcaacatattgataagacttgatttacccacattcgaacggcctataaaggcatattccgggaaaataccggctgggcatttcttcacgtccgtattgctaatcacaaattcagcacttgttatttccattttcttgtcatttatttctttgtaaaatcgtttataataaacttgttcattgtttataataaactattgcgcagtttataataaactctgccattatttattataaacttcggagtacctgttttcatggtactttcagcgttttcccttttttagacatacaaattaaccccgcaaaggtaagcgttccatttaacattagcaattcataaccgaatttatatccggtttctttttcaatccaccagtcggcaagatagcagatcagtggtgaaaggatggctatgagaggaacccaccggtcgttcgtttgcctgcgtgtaaaaagtccgaaagcaaacattccaagcagggggccgtatgtgtaggaggcgatgatatatatggcgtcaataacgctcttattattaagtatttctaccaggcagatgaagaatgccaataagactgataacgataaatgcactttgcttcttttgcgacgtgccgtttcttctgtgtctttttccgtattcagcaggtctacgcatacactggttgtcatggctgtcagggcggaatccgagttgctgaaagctgctgcgataataccgattgtaaaaagtaccaatacggattgtcccagataaccttgggctgcaaacatgggtagtatatcatcattcatggctggcagttcgaggtgcatctgtcccgctagcgctattaatagaattcccaagcatagaaaaaggaaatttagcggaatgaatgagaaaccgtagcagtacatgtttttttgtgcttcctggaggttccggcaagaaagattcttttgcatcatatcctgatccagtccggtcattacgatgacgatgaagataccactgaagaactgtttgaagaagttctgtcgggatacccagtcgtcaaatacaaaaatacggctgtgttcgctgttttggattgtttgcacaatgccgctgaagttaaggtctaatctttggatcgtaaaatagatgataaaaatcagagcggcaatcaggcaaaatgtttgtaaggtatctgtccacacaatggtctttattccgcttttatgagtatatatccataccaatgcaaccgaaccgacagcaatcagccaaaagggaacgtgcatttcctgaaatacatacgtatggagaatgaggcataccagataaagtttggctgcggttcccaacatgcgtgacagcagaaagaaaaaggaaccggtgcgataggcacgcatcccgatgcgggtgccgagatatccgtagatacttgtcagattcaacttataatataaaggaagtaagatatgggctacggccatgtatccgaagaaaaatccgagtaccgtttgcatatacgtcatatccattccgcgcaccattcccggtacagagacgaaagtgactccggagatagaggcgccaatcattccaaaagagactatataccaaggtgattggttctctcccttgaagaacgctgcattcgatccgcccttacgtccggtgatacgggctattagtaataataccgcgaagtagcaaagaatagtgactagtatcatcataacagatgcaaaggtagcaatttttgtaggtattaaaaacaataatctgtatctttgcaaggttttatcgatagaacagcaaatattatctatgaaccaacaatatccttctatactgcttgaaaaggcagtcggcgaattttccaaacttccgggtatcgggcgtaagacggctatgaggcttgttctgcatctgctccgtcaggatacggctacggtggaagctttcggaaattctatcataacgttgaaacgtgaggtgaaatactgcaaagtgtgtcataatatatccgatactgaaacttgccagatttgcgctaatccgcaacgggatgtttccactgtctgtgtggtggaaaatatccgtgatgtaatggcggtggaagcaacccagcagtatcgcgggctttatcacgttttgggtggggttatttctccaatggacggagtcggaccgagtgaccttcaaattgaaagcctggtgcagcgggtggctgaaggtggaatcaaagaagttattctggcattgagcactacgatggagggggatactaccaacttctatatctatcgcaagctggataaactaggggttaaactaagtgtgatagcccgtggcatatcggttggtgatgaacttgaatatgccgatgaagtaactttaggacgcagtattgtgaaccggacgctttttaccggaactgtataatcattattaatcatttaagaacgaacatggaagaacagataaaacgagctgtcagaaatttgaatatcagttatgttttcttttgggtgctcccggcatttttgcttggggcaggagaatttgaactttttcccgtaggaggtttggtagataacgcatcagctacctattattttgagacggtcggcattttgctcactgctttgtgtgtgcctctttctctcaaattatttagcttggtgcttaagaaaaagatagatcacatgactatcacgcttgccttgaagcgatatgtgcaatggaacattgttcgcttgggagtgcttgaagtagctattgtagtgaaccttttgtgttactacctgacgttgagcagtacgggtaacctctgtatgctgattggcctcacggcgtcacttttctgcctgcccagtgagaagagattgcgtaacgaacttcacattgcaaaagaagaaaagctatgagacagtctttcttgatgaacgagcgtatctatcttcgtgcggtagaaccggaagatatggacattatgtacgagatggaaaatgacccttcaatgtgggatattagtaattttacggttccttattcccgttatgtgcttcgtcaatacatcgaaggctcacagtgcgatgtgtttgccgataagcaattgcggctgatgattgtacgcaaatctgaccagtgtatactcggcacaattgatataacagattttgtaccccttcattcgcggggagaagtagggattgccgtccataaggattatcggcaacgaggttatgctactgatgcattgaaattgctttgtgaatatgcttttgattttctgtctttaagtcaactctatgcacatgtcatgacggataatgaagtatgtgtaaaactgttcacctcttgtggtttcgttcaatgcggattattaaaaaactggttgcaggtggagggttgttacaaagatgcattgcttctccaatgtttgaatcctaagaaatgagaaattaattgagagtaggcacttgtgggaaacgtgaccacgtttcatacttgctgcctaacttctctaaagctttccgccacatatctttaatattgtttttcatcagatatgatttctcttcctcggacaccaaccaagtgttttctctgatttcgttgctcaactgttcgctatcccaaccggaatatcccaagaagaaacgaatgcattcactgattttattcccttgtaatatatatttctttatttcatcaaaatctccattcaaataaagccctttactgatagaaatggatccggggatatcagataatgtgtggagataaaatagggtatcagtggcaataggtccacctttgtatagaggaatctcatccaggtatttaaattccatgatgatatcgttaaggaacaatggcagttgcttgttgataaccaatcccatacttccttcatccgtatgatcgaccagtaaaattacggatctgccaaacgttgcgtcacgtagaaaaggttctgatattaaaatccttcctctcgatggcaacacattattcgattgaatcttaaatatgtcagagtcgatattcatgccactaaagtaagaaaaaaaacggaataacaatcgttctttccgttttttttcattttaagaatggcttttatgaatatcttatgtcaaataatcaggctatcggatgattttcagcaaatagtttcattctttcatccagttgagcatattggtggtctttaatgaaagaggtacacgcgcgcaatccttcctgatggcttcctgtagttactaatgagatagcgctgactccgtagtacatcaattctttcgccagttcgccactggtcattcccggataaccgatggtgaaataaaatccgtctgcaatcggctcgcccagatcgttgtcatataccagatgaaaaccgtgacggaggaagatttcttttaatttccgtgctctttcaccgtatatcttcacttcgttaaggaaattatattgtccttcgttggcagctttcagcatggcggccatggcgaactgtgcagaatgactagttcctgaagaaagcgcataaagcacacggtgaatgaaaaccgttccgaaagttccgccaccatatcgtttggtcagtcccggatagcttcggtggtatagtttatcagagatacaacttaccccaatacgttgcccggcgtagctgaatgcttttgagccggaaatcagcaatacgtaattgtccgtataatgggcaactgatggctggaaaggaggttgatacggtttacttaaatcttggcggaagtccatggcaaaataagccaaatcctccagaacaatcacatcatacagtgttgccaattcaccgataatcctcaattcttcttctttcaggcaaatccagctgggattattgggatttgaataaatgatggctgatatatttccttttttcagatagctttccagtttctctttcagtttttctccgcggtagtcatacacatcaaatgtttcaaacttttgccccattacaaccaactgctgtttctgtaccggaaaccctggatcgataaacaaaatcgtatctttcttttcgtcacattggctgcaagtaagaaatgaagcgaatgtaccttgcatggaaccagtgacaggcacacaaccttccggacttaaatctacgttgatgaatgctttgataaagttggatgcctctttctttagttccggcaatccgttgatgtcgggatatagactggcaatgccattttgtaatgcttcaatttccgctttcacgcctacagcggaaggaggaagtcccggaacacccatttccattttgataaattcaactcccgatgctgtttctgcttttgaagcaatagctttcacttcacgaatggtagctttggaaaaatcgacaatttgaaactcattgatggtttcgtcaatcagatgtcgttcaattggtgtatttttcattctattttctattttattagtagctgcaaatgtacacgataattcttaataaacccactttttcagaaaaaagatactgaagctattgcaggtttcaaaaaaatatctacctttgcatccgcaatcgagagagatgctaaagtgaatattttggtgcgttagttcagttggttagaatacatgcctgtcacgcatggggtcacgggttcgagtcccgtacgcaccgcattaggaaataaaaaatcctctgatttactgaaaatcagaggattttttattttgaagatagcgaataatcgctatctcttttttccatcatatccccatttcacatagatggctccccatgcaaatcctgctccaaatgcagtaagaattaggttatctccttttttgaatttatcttcaaaatcccagaggcagagtgagagagtgccggcactagtgttaccgtatcgttcgatgttgaccatgaccttttcgacaggaacttccaaacgttgtgttacggcggtgataatacgttgattagcctgatgaggaattacccagtcgatgttttctttgcttagatggtttcttgcaatgatagattcacaggcatcagccatgttggatactgcatatttgaatacagtacgtccttcctgatagatataatgcatttgattatccaatgtataataagaaggagtacatatagagccacccgctttaatgtgcaaaaaaggcaatcctttaccatctgttcttaacacagcatccataatgccaaaatcttcagtagtaggttcaagcatgacagctgctccgccatcaccgaaaatcggacaagttgcccggtcggcataatttattattgacgacatcttttcagcgcctacaactaccactttcttgtaatttccagaacggataaaattggctccagtctccagtgcatataaaaaaccgctgcaaacagcttgcatgtcaaaagcaaaagctcttttcagtcccagtctttcacataaaatagaagccgtggaaggaaagcggtagtcaggggttgttgtagctacaattatcagatcaatatcatccggatttgttcgggtgcgttttattaactgtttgacagctttacgagctatgtaagaagttcccagtccttcctctttcaaaatacgtctttccttaataccaatacgccccataatccattcgtcggtagtatctaccattttggaaatctcatcattggtcaagatgtaatcgggtacatatcctccgactcctgtaattactgcgtttattttttccattcgttttatctagttttggtaaattgaataaggaggttcattcgaaaatcaaaaatgcgggcgcaaatatatggaaaagagaccgaattccaatagtagtttgtgaaactgtagcctttttaattaataaaaaggaatatttgaccaaattttgtctaaatttttagcaggcaatttttgtttaaatgaatgagttgttgtaaataattgattcataggtaattgtgaatgttgctccggtattgctaactacgaagtttgtcaaacaactcgtcattgtataaagatgacttattggttagagactatttaaattttatgcaaatcatattttcgcttcctttcttgtcttgcaggttcaagattttcttgatgacttgcaaatgtgtgttcttctaaatccatactgccatcggtaatgtatggtaatagtcagttattcatcaagaaaaatattgtatatgtgaaaatatacacagcgatatgataaccggcagaagctgcagtacgtaccagatgcagtgtaaatgctgttttacctaccgcaggacgggcggcaataacgatctcctcaccgggttgccagccgcatgtcacccggtcaaggtcggcaaatccagtagtcagtcctgtagcactgttcttgttgctggccatgcgggcctctatcaacttatagtgtcctctatgagttgtgacgtggaacagagatgttcggcagtaccacattcattttccaatcggtcgaggagggtatgggcatttgccagcgtatcgtctgtatcagttatcctgatagttgggaaaataagccactgccatctcggatagtacgtggcaaccgtgaagcagccagtcaaaagattgattatccattgtttaaaatattttagtacgccgcaaaattatgactcgtttcattggatgaaaaaaacgtttttctgatgctggtaatttaaatgtaaaataagtatgaatatttttaaataaaaatctaattatttaaacaatcttttctatatttgcattcgatattagattttatatggcagttttgtcgattaataatcagtaatatcaaaccatttatatataactaaattttataatgttgaaaggaatagaaataataaaagatcgtttacaacgaaagcgaaaacagtacatccatcagggagagaaaatagaacaaatgaagtgtacaatgcaaaacaccggtgaggaaattgagcaactggaatatgtgcttaatgagatggagcatatagcggatgtaaatcgtgcgccacgagtgattccaaatgctagggtggaggaggtgtttgcatatctctgccgggtgtttgagtttttgcagcaccgtttaaagctgcatttcaaatataaattggcatgcgaagtcatctttgcctactatcagtttaaaagtcggttgcatactcctggacgggaatatttaagctttgcaactatactgacttactttaaacgtgaaagaggaatggcgtatgggtgatttcaaaaatatcgaaatatagagataatagtgtgaaaaacaaatgttttaggaacagaaatgacgaatttgatattttttccttatttttgtgtgtccatttttgaatgatatgatacagataatacgattaaaaggaaaagacaaacacttatatcggcttttagcgccgatggtgatggatcccgaagtgatacgcgcaaacaataattaccctttcaagacgggcgaagagtatgtgtggttcattgcgattgaagataaagaagtggtgggcttcgtccccgtggaacagaaaagccggaagaaagctgtaatcaataattattatgtgaaggcagaaggcaccgtacgggaggaaatcctgtcacatctgttgcccgctatcgttgcggaatttaggcccgagagttggttgctcaattcggtcacactggtacaagataaaggaacatttgaaaagtttgaatttgtatcgatggacaagaaatggacacggtatgtaaaaatgtatagataacttatgacgaaaaagaaaatagcaggcacaaagaatgtatatgaattagcacaagaacgactgaaagttatatttaatgaatttgataatatatatgtgtcattctccggaggtaaagacagcggggtactgctgaatatgtgtatcgattatatccggaagaataacctgaaggtacgtttgggagtttttcacatggattatgagatccagtataaaatgaccatcgactatgtagaccggatgctggaggccaataaggatattttggatgtataccgggtatgcatccctttccgtgtggctacctgcacctcgatgtatcaatctttttggcgtccgtgggaagacagcaaaaagaatatatgggttcgttccatgccgaaaaaggcaatgaccaaagaagattttcctttttataatacaaccatgtgggattatgaatttcagatgcgttttgcgcaatggatacataataaaaaagatgcagtgcgcacttgttgtctgatcgggattcgtacacaggaaagtttcaatcggtggagatgtatctatatgagccgtaaattccagatgtatcataaatataaatggacttcaaaagtagggaatgatatttataatgcctaccctatttatgactggaaaacaacggatgtatggactgccaatggaaaattccagtgggattataatgttttatacgatctttattatcgtgccggagtcaatctggagcgtcagcgtgtagcaagtccctttattaatgaggcacaagagagcttgcagctttaccgggtgcttgatcctaatacctggggtaaaatggtgggaagggtgaacggtgtgaactttaccggtatgtatggtggtactcatgcaatgggatggcaatcggtgaaacttcccgaaggatatacatggcgcgagtttatgtattttttgttgtctactctgccggagcgggcgaggaagaattatctacggaaactttcagtgagcgtgaatttctggcggacaaaaggcggatgcctgagtgatgccaccatccagaagctgattgatgcgaaagtaccgattatcgttatggacaacagtaactacaaaacgttgaaaaaaccggtacgtatggaatatcaggatgatattgacattccggaattcaaagaaatacccacgtataagcgaatgtgcgtttgtattcttaagaatgaccatgcctgcaaatatatgggattctcacctacaaaggaggagatgagtaagagaagtcaaattatggaacaatatagaatcatagtatcatgagtgtagataaaagccctgtttacgaggtaaaagcggtacccgtagaaaaagtatatgcgaacgattataatccgaatgtcgttgcaccgcctgaaatgaagttgctggaactttctatttgggaagatggctttacgatgccatgtgtatgttactacaataaagatgaagaccgttatatcctggtggatggttaccatcgctatacggtattgaaaacttcccaacgaatctataagcgtgaaaacggtttgttgccgattgtggtgatagacaaagacttgtctaaccgtatgagttcaacaatccggcacaaccgtgcgcgtggaatgcataacattgaattgatgtgcaacattgttgcggagcttgataaggcaggtatgtccgatcaatggataatgaaaaatattggtatggatcgtgatgaattgttgcgcctgaaacaaatttcaggacttgctgatctgtttgctaatcgcgaattcagtattcctgatgaggtggcacctacggaaactgagcgtaaaaccttataatctgatagttatatatatacagaaattgagcattttgtcatttgggcacaaattatacaagttattagcttattttgttgtataaaacagctagttattctgtctaatttgtgcctaagttgtgtctaaatgacacgaaaaactataacttccctctattgtccaagtttttacgaaagaaacttgggaattttaaaatgttcgcatatcgaaagaaatgaggatattgagtatttttgttgtgaatttcgtaaccttgttgttcgctacctacataattagcccctttattctaagttgattctctgtaacagaaatgaatacaattttgtatctcctttaatattccgaaatttgcaatatgagatttggacaaaaaatattgtcctgagagaaaagcaaaaagagaagtaagagagatatatgagaagtagaagaaagtacattagagaattaatgagagaaataacaagacttacaacctgttttttatatttgatttctttattatctgtggtggggtgtgtgcaggagttgaatgtgaccggcactctcatccaattaacgccagaggtgacaacttgtgcggatatatatgccgggttgttgattaaaccattgagcaatccattgcttggctctctgccttatagtgacattcaagaaactattcccatgaattatattatgtatgagtccggcttcagaacaacacctgtctgaacattcaagggacttacaaaagtcaagactcttattacaagataccgatagtcacttccgttggtctagtgataacataggtaaccataggtaacagtgggggactctgactggttgatgtggtatgaagaaggacaaagagaaacaggtgacaggatgatgtatatctaacattaaaaacaggaaatttggaaaaagaagttcatattagacaaaggaaagctgttcctgctgcgggaagtacgcttcagctcatgcctactgaaaattcaaattcggaggtatatgaaatcaattatttctgccttacgggcgaagtggatgaaagtgctaaaaattggatccgtctgtattcttccgtaatgccggaggaacatacaggagaagaacgcattatcgttgaagacggtaagatatatattaaggtattgcccaatatagaggcggattccagaaacggaatcgtacatctcacaacaatggcgtcttccgttaaaacgggcatcagtaatgtgcaacgcataaaaatagatgttactcaattggggcaataaataacagtaaatgtgatataaatgaagaaagttgctatactcatattattcatgctcggatgtgctatttccgagggttatgcccagaaggttgcgttgaaaagcaatctgctgtatgacgctaccactaccatgaatttggggttggagatcggactggtgcgtaaatggacgctggacattccggtcaattataatccgtggaaactttccgacggcaaacgcctccgtcattgggggatacaacccgaagttcgttactggttttgtgagagttttcgccgtatatttatcggaatgcacggacattatgccgatttcaatgtaggagggtggcccgactggtcttttatcagtgacaatatgcagcatacgcgttatcagggatatctttatggcggtggcttttccgtaggatattcgtggattctgaaaaaacgctggagtatagaaacgtctgtcggagtgggatatgcgcacattgtatatgacaagtatccttgcgctacctgtggtacgagattgaaggaaagcagcaaaaattatttcggacctaccaaagcaagtgtgtcacttatttatgtaattaaataataaggagtatgataataagaaatataggtttccttgtgtgtatgttggtggtttgcagcctgaatataaacacagctatggctcaatcccgctcttacgaaggtggcattaccgtgaatccggtgcggttggaacagaaaggtgattttattcatgtcgatatagattttgttttgaataatgtgaaagtgaaatctgcccggggaatggatttaattccgcggctggtgacttccggacgcactctgaatcttccgaaagtttctattaaaggtcgtgacgagtatttggcgtatgagcgtgggcttgcgttgatgagcgccaaggagaagagaagctatgagaagccgtatatagtggaaaaagccggaaaactaagaaatgatacgattcggtatcaatatctggttccgttcgaatcatggatgaaggatgcgcgtctggacatgcagcgtgacgaatgtggttgcggtgaaacggcattaatgaacatcgaggaatttggcaaagtgacgttggaacgtgtatggacgccttatgtagtggttcctcagtttgcttatctgcaaccgaaagcggaagaaatcaaacaacgggatattcaagtagaatgttttctggatttcgaggtgaataaagtcaatattcgtcccgaatacatgaataaccctcaggaactggctaaaatccgcaagatgatcgatgagctgaagtccgatccgaatgtgaaagtgaaccgtctggatattatcggttatgcgtctccggaaggaacattggcagcgaacaaacgtctgtctgaaggacgtgccatggcgctccgggattatctggcatacagatacgattttccgagaaaccaatactacattgtctttggaggtgaaaactgggacggactggagaaggcgcttgaaacaatcgaattggaatataaagacgaagtgctggatattatcaggaacatacctattgaaaaaggaagagaaacaaaactgatgcaacttcacggagggacgccttacggatacttgttgaagtatattttcccaagtttgcgtgtggctatctgcaaagtgaattacgaagtgagggattttagtgtggaggaagcaaaagagattatcaagacgcgtccgcagaatttgagcttgaatgaaatgtttctggtagctaatacctatccgacaggctcgcaagaatttattgatgtgttcgaaacggctgtccggatgtatccgcagagtgagattgcaaatataaatgctgctactgccgctttatcacgcaatgaattggtttcggctgaacgttatctgggcatggtgaattcgaataagaatttgccggaatataataatgctatgggaatattaatgttaatgaagggagattatgaatcatcgaagaagtatttgaagtttgcagagcagtcaggtctggatgcagctaggggcaatctggaagaattagtcaggaagaaggctaatgctgctaaaatgaaaaagaatggtaagtaaaacttactgattaagtgggaaattatataagtattaattctaatatttttttgtattatgctaaagattaaatcaattttagtttcattgctggctgttgcggcactggcaagttgttcaaatgagaatctggaggaaaatccggaggttgaagggggagcaggttatgatgtagcttacgtatcaattagtctgactaatcccaaagtgcctggttcacgtgcttctggtgaacagacggctttagaggaggaaagtgcgattaatgagctctatttgattacgttcaatgcgagtaaggtggtgactaaggatgaaaaggcaactaagtatgccacggtattgggatcaagttctttcggaacaaatagtggagttacgactccgaatactccggttaaagtggatccgaatactaagtatttgcttgttattgccaatccaggttaccaattaaaggatcgcttggataatctttcagcgggtgcaacctatgctaccatcaatggaatgattacagttcctgaaaacaatactaagcccaacaatgcttatctggtagaggaggttgtacactccaatggttgtgcaatgattaatgtcggattctacgatgattccgattcagatccatccaatcatgcatgggaggatgaatgtctgcttgatgtatcggataagattgttttggtcagcgactataaatcggaagcgcaagctcagaatgcagcgaaaagtaatccggctacccttgagatagaacgccttgctgcaaaattggaggttatgattggcagtccattagcagttggaccttttgaagatggaacaaatgcaagtctaggacagtttgattttggaaattggactatagattactacaactccctgttctttccttttgcaaagaagactaccacagcatcgtctcatactaccggattttacaaaagtaacttctatacagtcgacccgaactttacgactgcgggtggaaccgaatatcttacaggcattattaagaatacactcgatgctgcaactcgcgaacctaaggtggaatgggttgctgaaagtgcgactgcaggtgataattacaaatactgtatcgagaatacgatggccgcaggatatcagaagttcggtgcggctacgcgtctggtacttaagggacagtatgcaccttggaagtctggtgaatttactttaggaaatgactggtatcgtcttcctaacggaactaactctgtaaacttcaagagttttgccgacttgctggctgcttatacgcctgccaaagctaaagaaacagcctcagaccctatgaccgcccaggagaaacttttagtttcggcatgcgaactgttctatactcagataaaatctgaacttaccgccaatgatccgggtgattttgcatcccttacgcaggctattcttgacgacaacaacattcagaatggtggtgaactgtgtaaaaaagaaggttgcatctattggtatccaaagagtctcaactattactactatgagattcgtcatgacaatgcagccaattcttacatggagtatgggaaatacggtgtagtacgtaataactattatacgcttacgctgacaaaggtgaatggtaacggtacaccgtggtatcctggtggtggtcccgaagatccggatgaagaagaagatatcgataagaaaggtgcctatctccattttgagattaaagttgctccgtggatatactggactacaaatttcgaaatctaaataaattctttactttcaaagaaaacagggcagtgcggactgcctgccctgtacttttaaaatagatattccgtacggaacagaccgccgaaaaaagtaaaaacaagccggtgacaggcttcccaaaaacagcactgaaatataccggcgcatccgagatgcaatgaaatgcaaagcgcgccccaaaaagaggaaataaccggaggtcacaaaatagagatctctgacaatataaaatggcaaaccgatagggttgcccctaaaagaaaagatatgttcggaaaaactaaatcgctgttccttatcgttgcttcgatgctatgtatggcttcgtgcgacagtatacgcgaagacctgccacggtgcgagctttggttggaatttgtattcgactacaatatggaatatgcggatgcatttaatccgcaggttaaatcggtggatgtacttgtgttcgacagcgatgataaattgcttttcaccaaaagtgccgaggttgctgcgctggttggtggaagccggatgtcgttgaccgacgagctcgatttcggaagttataaagtactgaccgtcggaagtctgtctgacagattccggctttcggacaatgcaggtaataaactggtgccgggaacaaccaccctccaacaagtcattgtatccctgaagcgggagatgggtgttgttaatttcgaatttcagcatctttacttcggagaagttgtggaagtggaccaccctgccatccaataccaaccataaaatttatccggtgaacctgatacgtgacaccaatcggtttaatctcgcgttaatgggatatgaggaaaataaagtggatggcacacaatatacatttgaaattcaggcaccggaaaatgcggtttattcctgggaaaacgaacccacaggacaagggccggttacttatgtgccttactatacaggtccgggtgaaatatccgatgtggttatgtctgcacgcctgaatacgatgcgtttgctcaacaggagcggatgggattataagtttattataagggatgcgaataccgaagccgaagtctggagctacaatctgatgacactattgagcattgcccggccggtttcccgttacgacggaacggaacttccctttcaggagtatcttgacaggcagagtgaatggaacctgatatttacagttgttgaaaaacccggaggaggattccttcaaattggtattgtcgtggggacctggattcattggctccacgggatggaagtttaagaatgagaaaaaagctattacatatcatttatctggcatccaccatccttttgttctcatgtagtagagaagctgatgtggcttatgagttgcctgcccatactaccagggcgcaacttagcatcgacttggtgaacaatggggatgtggaacaacaggagaagataaactccatgcggtttatcgtattcggcagtacgcccggtggcgtgaggctggatgtgaatgaacacatcctgttgagcactccggagacagctactgatatagatgcgcaacttctcgaagtgacttccagcaatgatattctggtcgtagttattgccaacgaaccgcagagtctcacaagccaacttgacggtatagctaatcttttgacattacaagagatgatttacgacatctccagcatactgaataatgacgggcagattatttcggcgaccggaatgcctatgacaggagtgatccgggatatatccatagcacccgatgaaaccaaaacagtgcaaatggtgatcgaacgtgccgtagcccgggtagatgtctttatcgaagctatagacggcggggcagtgaccggatatactgccggaagcaccagtgtcaccttgcataatttttcccatgatagctatttcgtgatgggaaatgtgggcaacggcacgcgtgataacgccgactcttcaaaaaactacggaaaggtgaaggaagacgtgtcggaaagcaatttattaacgcatagctggacggctgcgactacagaaacttgggcatattcatcggctcccggagctgaaaaccggaagttgctttgctcgttctacacagccgaacgcctattcaagtcggattattccgaccgactgtctatcagtatgactaatgttccgaaagggccttcggacgtcaccggaataaccgggaaagtaattgaaagcgtaacaaaggttgacggcacaggtagtccgacagcgcaaccttttacggagatccgtcggaacaacgtgtatcaggtaacggcacgcgtaggaaaaataggtattcagatactgacgataagcgtagaagattggggtgaaagacaagacattgatttggatatggacttgtaatatctttcgctgattgtttttaatttcggaaaagaagtaagatgataaagactataaataatattaggatgattatggcaatggctgtcctttcggctgtcctcttttcgtgtgtcagagaagagatgacgtgtgataaggaattaattgttgtgcaacgtattggagaaggcggctatgtctacactcgtggtacggtaatctcttcgaataccgatctgaaagaagagactttcggtctttacggttcactgactcccaatgcttctgttccccaaccatacttcaatgcaagtgctacggttaacgccgacctgacagccaccatctcgccgttgcaatattggcccggattgttgaatgcgagcatgaagttcttctcctggtatccgtacagtgatgcgaatgcgcctactgcgagtttcactgatcccggagaaatggtgctgaattatacagcgaatgaatccgccgccaatcatgtcgatgtattggcggctatatcgggccctatatgggttgaaggtgtgaatatacacttctaccacacattgaccaaggttacctttacattcaagaaagtagctcctgtaccgaatgaggtgactatcgagaaaatagaattccagaatgtgggaaaaagcggtaaccttgcgatgactgaaattccgaccaccacgacgaaaaacggcaaaccgaagtttgtctggagcgatgtcgccaccgggaaggtcgcttctactcccaccggtaacaaaacagttactgaagatgccaccttgataggtgatacattcctcatgttgccgactgacgctttctccgcaaccgccaaaatcgttgttaccaccaactttggcgatcgggaattcctgttcagtgatattctcgccaagaatccgcattcttgggaatcgggcgagtacatcaactacaatcttacgatatccaacgaaacctatcagctttcagctaccccgcttgaatggacggaaagccaggtgaatgtaattttcgataaacagtattatctcaaattatcgcagaccaaggtacagacggctggtgatggggtcactgtcaatatagaagtgaaaacgaattatgatgctaatccggatacaggatttctgccgggggcgtcattaaacaaaagtaccatggatacgtggccgacagttaatatgactcagatatccctttcagaaagagtgtatacgtataatatccaggttgtgatgcccagatttaattcaggaaccggaactaagcgggaaacaggcttttatatcaatgccggtaatttgcggcaccatgtactgttgagccagtggagagaagacggagagtggctgacctcgaacgtagagttggacagcaacgataatggaaccggaaatatgcgacgtcgcaagattgtctttacttcgggcaatccgggaatatgggagtggaagataacccagatacaagatccggataaaattctgcttaacagtgagacaatgctcgaaacaagtggcgtgagtggtgatgcggtttacttctactttagagccgatgctgtgtccggtgatacggctagactcatactaaccaatacgaatggtgataatctgccaataacggtgacattgaccgcaccataatgacgaatatgcaatatcaaagtttaaggaaaggaaatagaaatatgcaatatgggttttcaataaaaagaaagtgctatcttttgtctgttctgttgatgacggtatggcttaccggatgcgtacaggaagaatttgagtcgacgccttctccggcaggaaacggtattcgctttacattaacggttcccgatgtaaacctcccgtccgtatcttcgcgtacgatgaccggaacgggaacagcaaagaaagaagacgaaataaaaacggtggatattcttgtttttgatatgtcaaaaacaccggcagtatttctggaatggggcagcgctacaggagtcactcaggacttggctgacaattccactgtgagtttctctgctgtgctttctcccactaccgcatctacctgcatcgtggttgtggcaaataaggaacttgataatattgtgtcgggcttcacgaagggagcgaccaccaaggttgaggcaatggaaaagatgctccacacccagaccggcaaatggttggcagatggctcgacaactggtgggtatacgcggattccgatgtacggggagaaggtaataagcaaaatcactccttcgatggatccgataaccggcataaatatgaaacgtatgctggcgcgtattgatatccgtaataacagtgtcacttcaaatttcacggtcgaagaggtttacctggccaattacaataccaccggatatattgctccggcatggaacacgaacgggcaggttactgaaccggctccggatactcctgttctccccacgggcagtggtaaaatgacggaggaaggggatgcaatccgttattccgtaaatggtaacacaccctacgatggggagatttatacatttgaatccctggcggcagaggatgccggtggtgcgggagcagacggagaagcgagccgtaaggatgctacttgcctgattgtgaaaggaaggaacggtacgggtgaatcgacattttaccgggtggattttaccaaaaacggaaatacaggagagcaggtggaatatttgcctttgaagcgaaaccataaatacatcattaccattacccaagcattgggaaccggttataaaagttttagcgaggcgctggcatcatatacagtcatgtccaacctgaaattccggttgatacactatgatcgtgataaggtcaaagatatagtctacaatgggcaatatatgcttggagtgggtgaatcggaggtcgctgtaactcaataccagaataatagttatgctatagacgtttttactgacagtcccggaggctggaaggccaccattactgcagggaacgactggctcaaatttgaaggtggagctgatgcggcatcgggcattgcaaacgatgatacccaactcaaattgaagattccatattttaataatgaaaatattggtgttgggcgtaaggctactgttacgttgacggcagggcgcctgactcacaatattgaagtgacgcagtatacaatagatccgggaattatcaaatttgtcgatgcatacggaaatgtgttggagagaggtcttttttttccaattcgaaatcctgatggcgacgaactccctctcgaaccgcagacggtgtatgtcatgttttctgtggataggatagaaggtaagctttatggcactggcggtgtcaatatggtccaatataatgccggcggtttggttccgcaattagacaggacgaatgcgataccgttcagtgaaagagtacaggcgtttaccatacagcctaatccgcgaagagcaggcgatggtactgttgaagatggtgcaggctggtggtggcgttgggactttatgttgttcgacctgtacgataaggaaggataccttactcaagtacaattccccatcaatcagggggagctggagttttcactccgatatctttccactacagtcaatagtcgtacttataaagtcaatctgggtgcggaacaatacttgcaattgtttgtcaataacaattgggaaattatggatattgaggaattgaatataacgaacaatgatggcaccggactgattcggaccgattcggataatgatgtaattataggtagaaagaatgcggacgacaagatgtatcttgagtctatcataggctatgatgacggcaagggaaatgatgtggttggtcatggatacgatttcaggctgaagcttcaccccggcaagtggaaagaaggaaaaagcggaacgataagaatcacgttcagaaatgtaatgcataccgtggcggatgaagaattcccgttttatcgtacgattgaccttcagatggtgtccgaaaccaaatcttacacaactgccggggaacctcttttctatctttatccgcttcggtttgataataggagatattataacggaactaaccaaagtgtggggcgattggaaaatgtagccgatgcggaggatatctgtaggaatataggcgatggttggcgtctgcctactgctagtgaactgttgctgtcatttgtctatgaaaatgctttgggtggtaatgcgattaacagtaattatcatgacggtcagaatatatatgggtggtatcaaaactggacaggtaactactggtcttcatcatactatgaggctaaaggctctacaacacgttttgggatggaaatgtcggcaggttatccggattccgcacctgttagtaataataattattttcgttgcgtaagggataatacaaatagcggaaagaagtacccttatttgatggtagaatcctcgggggtcactattgtctctcgcgatgccagtggaggaacagatccttcggtgttatttgcttcaggtgaaactccggatacaagtggcgcaatgaataaggttgctcctaagtttcagattgaaaattccagtagtaatggtaaaacttgggcggaagcaaaagcggcatgcgaaagcaaagggagtggctggcgtctacctactcagcgtgagatgtatttagtacttagtatgggaggggctgtaaccaatatcgaaaaccaaggtttcggtgactcgactacttggacagggaacggattcgagaagattagtactgtgcactggacattgacttcacgcgatagcaactattggctggtcggacataataatggtgaattcggcgcatgggctacggtagagtccacaacttgggcttggtatcgttgtgtgcgcacaatagaataaaagctaaaagaactgtatcagaatgttgtttgtcttcattctgatacagctcgtctattaaatccttttctttttattcctagaatccacaatgtttagtgtgtttccctttgtttacaacgtattgataacttccaactgcttttgcaagaaagcaatacgctgtgcttctccactttccgaaaccagaatagagtggcgcttcaacgattgaatccaattgcgttgcatctggcagatatatgagctttgcgaatccatcgagttgatagaatatacccgcagcagactgacttggtaatcatgtttctcgatatagctgtaagtggcttcgaaactgatattggacagatagaaagacactttcttgttttcgctgaactctccctttatggaaagatgttctaccacgccaagtaactgaagaagttcttctttcaaatgcatgacatcgtccttgtttatcagattcaggctggcaaagtacttgatctctttcacaaaagaataaaagatatttgtgtcccagatgaaaaacgtttttggacactgtcttatactttcactcaacttcttatgcacattgacgatccgttcatccacagacatgtcttccaaagaatgtggcgtctttatatctccattctgatacatccatcggcaaagacggaatttagacaaattctcataggaagaataaagtgtaaagggaagggaattggatgcagtatacacctccgtcgtattatctgttttcacatagtcgaaaatttgcagataacggttgattatttcgtaataactttccagcgcactagtggcatgaagtaagttcaggtcgaaagtaactttattagatacatggctaccgacaatctggtcgatagaaataccgagtttttgagaaagcagcgctacttcgtctattgtaaaagacacctcacctctcaatctgcgatagacagcttcctttcccatgcataaaatgtcagccaaagtattggccagattcatatcttgaggaattcgctccttcattgtagatattaattcgtttagaataccatttttcattgtttgttcctttaattttaatgttaataatctttgtgatacattctatgcaaaattacgtcttgtgtttgaaagatttgtgtggaaaaacagagatgaatgtatgtgtctttttctgattgggaatcaaacggaagcggtgaggacagggaatgaaaaaaagtagataagaatcttatctactttcatttattggaactgatttttttttgaagttctaatctgcgaaaataaaattaaagagcgtcaataatttctcgctgttgcttgaagaattgaatacgctgcatttcaccgctttcggatatcaaagtggagaactttttcagaggttgaatccattctttcaaggtacagaaaatttcgttgtccatcgtggtaatggagttgatggaataaatacgtatgaggctcatttgcaggttattggtgtctacatagctatatgttgcctcgaagttgatattcgacacatagatgcgtacacgattgccatcggctgtcttgccattgatagccagttcttccagttcgtccgccaataagaataattcatttttgatttcttcttttgtttcgtcggaaatgagatggatgctggcgaagtattggatatcgttgataaggtgttggaaaatcatattatcccatatatagtctatggagtggatatgacgtgtcattgctacatagtctttctggatattgaccagtttcggtggaatatccaattcttcgaaactcttgcaatcaatatatttattctggtacatccatttgaataaacggaattttgccagaagttcatgtttcagatagagagtctggggaataatgttggcagaagttcccattacagaattcgggtcatccggcatcgtattgattagcgagacatatttttcaaggatattgtagtaactctcgaacgggtcgtcataatctacaatgtttatattaaacatggcgttcgatttgaaacttagtcctataatcttgtctagcgatatacccagttttcttgaaataagagccgactcttgtaaggtgaaaggtacttcaccgcgcaatcttctgtatactgcctcttttcctatgtatagcgtgtccattaacatatctgccagttgtcctttgagcggaagcttttccttcatcgcttctatgaggtttgcatttggattatttgtcatcataatagttctaataaataatacttttctattataaacatttgtcagtggcaagttgtttcggaaattgaaactatttaaatctgcttttttttaaaatatcctctccgaaaattgtttattttaagcaaatcggttacatttgtgaccataaacaaaacgaagagacagcgtctctttagtaaacaatagaaatatttagaatgaaaagaatattggtaagtggcggagccggttttataggctctcatctctgtactcggcttataaacgaaggtcacgacgtgatatgcctggataatttttttacgggttcgaaagataatatcattcacttgatggataatcatcattttgaggtggtgaggcatgatgtcacttatccttattcggctgaagtagatgaaatttataatttggcttgtccggcatctcccattcattatcaacatgacccgattcaaactgccaaaacatctgtgatgggagccattaatatgctgggattggcaatgagactggatgccaagattctgcaagcttctacgagtgaggtatatggagatccaatcgttcatccgcaaccggaaagctattggggaaatgtgaatccggtaggttaccggtcttgctatgatgagggaaagcgttgcgcagaaacattatttatggattatcaccgtcagaataatgtgcgtgtgaagattatccgtatttttaatacgtatggtccgcgaatgttgccgaatgacggacgggttgtttctaattttattcttcaagcgttgaataatgaagatataacaatatatggtgatgggaagcagacacgcagcttccagtatattgatgatttgattgaaggaatgataagaatgatgaatacggaggacgagtttacaggtcctataaacctggggaatccgaatgaatttccggtattggaattggcggaaaggatcattagtatgaccggttcatcttcgaagattgtatttaagtctttaccggatgatgatccgaagcaacgccaaccggatattacattggctaaagagaaattgggctggcagcctactgttgaacttgaagaggggctgaagcgtatgattgaatattttaaaaatgtctgaagcataaaaaaagaaaattatgaatatggaaattaatccttctgaatataaagtccttattgtggacgatgtaatatcaaacgtccttttattaaaggtacttttgaccaacgagaaattcaaaattgtgactgccggtaatggaacacaggcgttggaacaagtgaagaaggaaaatccggatcttgtattactggatgtaatgatgccggatatcagtggctttgaggtagctcaacaaatgaaagcagaccccgaaatggctgaaattcccattatcttcctgactgctctaaatagtacggcggatatcgtaaaaggatttcaggtgggtggtaatgactttatttcaaagccattcaataaagaagaattgattattcgtgtgacgcaccagatttcgttggttgcagcgaaaagaatcattgttgcacaaacggaagagttgcgtaagacgatcatgggacgcgacaaactctattctgtgattgcacatgacttgcgttcaccaatgggatctatcaagatggtgctgaatatgctgattctgaatctgccaagcgaaacaattggtgatgagatgtatgaattgctgacaatggctaatcagacaacagaagatgtattctcattgcttgataatctgctgaaatggacgaagagccagattggtaaactgaaagtggtttatcaggatattaatatggtggaagtcgtagagggcgtaagtgaaatctttacgatggtggccagtctgaaaaatattaagatagtacaagatgtgcctgtagagaatgtggctgttcgtgctgatattgacatgattaagacggtgattcgtaatttaatcagtaatgcgattaagtttagcaatgaaggttcggaagtagtggtgtcactggcagaagaagacggtatggcaatcgtaagtgtgaaagacagtggttgcggtattgatgacgaaaatcagaagaagttgctgcataccgatactcatttcagtacctttggtacaaacaatgaagaaggttcgggactcggattgttattgtgtcaggactttgttgtcaaaaatggcggtaaactttggtttacttcaaagaagggagacgggtctacatttagtttctcaattccattgttggagaaataagataactatagataatacgactagaaataataagggcacggtttgcatgaatatgtaaatcgtgcccttatttaattggtatattctattttcggtttatcgtttgcagatagccttaaaatcgcaatacgaacattttttagtatcttctgtctgcgtaaaaggctcttcttcgctgaatatttcttctaataatgtttgcaggcgttcacggaattcatcttcaaagaaagcgaagttgtttaccggtattttcggtttacgaggttctcccatttcaataacaggcgaatagttttccgatgctgcccggtggatgtagagcagagcaggagctaccattaacgattgttgccggctcatgatagcagcatacagaaaagtctggaagatatagttcgggcgtgtttccgatggggtgaacagttgctcgatattagcaggtattttagggcttcctcctgttttgtagtcaacaatccgcagggtactttcttttgcatccatacggtcgattgtgccacccagacggagagtgaacggtccttgtcctgtttgtatagtaatctcttctgaaactttcttttccatagcgaccatttcgaaaggagtatattgaaggtcgttacgcagcaattgtttcagataggaaacaattactttggagttgataagttgtatgccgttatattccggtttttcttcgggagaaactttgaataattcttttttgaaggcttggtcaacgtagctttgtagcttcacgtcattgcgtaataagcgttcaagatcttctttctgtatcgtttttccggttgcagtcaggtcggtgtatgctaattgggcggagaggtggaaaatggttccgaatagagcggaatcaatttcagcactcacttcgtccggtgttttcaagcccgctacatagcggtagtagaatctcaaccggcaatccagataagcattaagggcggaaggagagagaaccagtgaatttggatgagtgctatcgtaagcacgatagattcgtcttagtacttcaggtgttttttctactcgtatctcttgggtactttgcggagattgtccggcttccagatactcgcgagtgatatcatgtggaccttctacaagtaattgcagcatgaagcgggattcttctccacggttgagaccgtccgaagaagtattgtagagtagcgtgatattctctgcccgttgtatcagtcgataaaagtagtaggcatacactgcatttttgtgttcgatagtggtcatgccaaatgctttccggagattatagggaataaaagaggaatctcctccggattttggaagttgtccttcgttgagagacaatataatgagattccggaagtccagattacgtgtttccaatactcccatgacttgcattccgatagcaggttctccgtggaaaggaatgttagaagatgtcagtactttggtaatcagtcgtttcagagtatcggtgcgtatatttagttctccgctttcaatcaaactgtagagacggttgattttggtatggctttgaaagagcgattctctatatagttgattgaagatatcattgtattctccttctttccgataaatggttgaaatgtttttgattaattcgatcagataatcgcatagttcttttataccattacggggagtgaagagggtagttagaaaatcatcctgtttaagttctgacggaagtggataaaaacggtttgtttgggtcagttcacgttccaggggaccggcatgggatgataattgttgggtatagggatgcttcaatatggcggatactgcctcgtaagtgaatcggtcggtatcggagcggtaaccattggtttgcagttccattacggcattgataaagctataaacaggagtttgagccaatgggaatcccatggtgatattgacattcttcacttcctgcggaatggaatgaagtacgggaagcaacagagcttcattacaaagcactacagcattttctttttccttttctacggtaatttgtgaatgatcgtttgttatcgccttaatccatccgggaaggaaacgtgcttgggcattctcggtagaagcggaaatataacgtattttcttcggttctttaaaggtgttgaaaaagctttccgggagttcgttcggaaattcctcgagattacgtttcaggaattctccggcctcatgttttttgatttgttgggtgtagaagatatcatagtcccaatagaagagtgccttgcccgcatctttcagttttctgaaaaagtcactttctactttgttcaaaacattgaacccgacaaatatgtatttgtcgtatttgagttggtcggtatcgagttgttcgatcacgttccggtagagcatgccttcgtaagcaatgcctaactctgccaggttcacacggtaacgatggtagatagtacctagcttgtcccaaagggaaataaatttttcttttagttcggtccgtttttcaatggagaaattctgaaaaaactgttgtatggcttcttcctgctctttgtcaaggaattcatagtcatccatcagatttttcaaatcttgtagattactgaataatttgtcggcatcgaccatattcttatctacatcatcaaaatcactaatcaacaattcgccccagaagtagaaatcgtccaatgtttcctgactccgtgtttcctctttgaacactttataaagttcgcagaccaatcgaataggatcgccgcttttctgtacggatagtttctgaaacaggtcgctgatactcatggcagctggtgaccagatcggtttatcggattctcctgctaaatattcattgaagaacaagttagcacgtttattagggaaaacgagtaccgtacgtgacaggtcgtttcctatcttggtatataaatcatgagcgactagttggagaaatgattgcatattgattaaactattttctgattcttgtatttattgtaatcggaacataacaggtacggtgaaataaacagcaactttagtaccatcttccagttctcccggtttccatttaggcatttgattaatgacgcgtaaagcttctttatccagataaggatctacgccacgtaaaacttctggtttgactatatttccttctttatcaacgatgaactgaataatagtacgcccctgtacaccattaccttctgttcctgtattagggtattgaatcttttttgcaagaaattccatgagagcttgctggccttcaggaaaatcgggcataacaggtactttctcgtaaacgtcaggatagtttatacgagtataagtgattctcaattccgggccatacatcgcactgaatgaaagcatcagattgtatgtcacttgtactgtttcatttgccaacataccgggtgtccaacgaggaatgagagacatgacccttaatatttcagcttcaactttggggtgtatcttgcgggtaatcttagggttgataacttgtccgtcataatctatagtgaattttacatcagtgtatgtattattagcaatactatctatttctgaataacgaagattttctttcagaaattctataaatttttctgttcctccgggaaattccggtagcttttccggaccataaaagggggcttcccctttcatgtctttttcttgtatcaggctgtcagcagtaatggtccaattcattttagggcattgcagtgtttctgcgtccaatgaagtaggaggtattattgtgagtataccagttgatagtccaaacagagcgatggccttacctacacggcgttttcgttcaagttgttgctccaaatatcgaacttcagcttcgcatttggggcaagtacccaaacaatctccctgatgctgacattcagaggtgatgaattcaatatcattcgcttcggctatctgccgacgaatctcttttaagattttacaggtttgttttcctcttgccatggcattaatcattaggggttttataggtgaatcggtcgaattgggtgattcccatttctttcaaaagttctatgctttggtcaatatccttctccgtattataggaagggatgagtggtgtccgaataacgatttgcttggctttgtctttcccgattaaatatcgcaaattacctaagacgttttcattattctttccggtatatcgctgatagatgttattattcatatctttgatgtcgattatgtaattgtctataatagaaatcagttcttctacattctgttgcggaacattgagagaggtttcgacagtgattctccattccgggccacagagttggcggaattgcctgataaattcactttgtaacaaaggttctccaccgccaaatgtgactcctccgcaactcgccaggaaataaagttcatctttgcgtacttcctcgtagagctggttacaatcatagctctcccaaacatcatcgggctgcaaagatgtcggattgagacaatatttgcaacgcaacggacagccatggaaagcaactaatgttgtaactccttcaccgtcaatcgttagtcgatggcgggcaatgccgatgagaggaacagctttcatactttttctattttttcttcatccacataccacaagtagccggtgatatttttatatcccatcttggtaagaagttgcatatatcctttcacttgtttgttatatttaggattttccttaccaaacttgaaatcgactacaacaacctgatcgtctttcatcattacacgatccggacgacgggtttgcaaaactcctttttctttatagataatagcacattcattaaagagtgtccattttccgaaataccaatcttgaatttcaggagaaaaaaaagctttctttgcaacttcacgagccactttttctttctcgtcatttctgataactccttcaaaaataagccgttcgatggctggatcgatatcttctgctgtttcgatgacagaaaataaagtatgtaacatacgtccgcggttgataaagtggtcgtccgaatcttcttcttcaatgccctgaatgaagtcagcagagcggttggactgacgaaattcaatatcatgccgcatggattccatccgaatagggagtttctctggtttctgggttagcttgtttgtggatgtcttgattctttctttttcggaagggcatagttgtccttgctcgtaacagtcttcttcccagtcaatcccttcttcttgggctactatcggtagggtgtttgccaatagttcggacatggtgcctttttgtttttttctgctccagataataaggtttttccctgcgcgggtaaaagcaacgtatagtagattgaggttatccacccaaagttgaagacgttcttgcaggtagtcgttaccataaatcgattcagccatttgggtggaatagttaataggaagaatatccaatgcattgaatggtgctgtttgcggggcacaccatacaagctgattattggtttcattctccagtttccagtcgcagaaaggaaggagtacggtatggaattccaatcctttggatttgtgtatggagaaaatccggataccttctacttctccactcggaattgttttactgcataatgtttcgtcccaataccggatgaatccgtctagctcggaagagttgctttgcagataatcggtcaccgcatcaaagaaagcaaataaataggcatcctgatctttgataagattcatctcgaatatgctgaaaagttcttctaaaagctcataaagaggcattagccttagttcctttgtcttttcaagaaaagcggcgggaagataattctcggcagggaggagtaggagagtattccaatccagtcctttctgtaaaacctcgttttgataggctacggccagttgggcacgtgctattttattattttcatcggaaaggaatcgcagtgcatccagcatcatacaaatggcaagagaggcgtcaaggcggaaggcttcgtctgataccactttatagtgtagctccttatcgaagtagtcggcgattcggggaatacttttattttttcgtaccaggatggctatatcattcagtcgtactccggaggtgaggagatgttgcacttcttctcccagactgattaatgtctgttcggtataaccatgttcttcgtcgggttcgagaaaagagacttttacatatcctttttctgtacttcggggagattcctgcacaacgtcggcataggctttctgcagatcctcacaatccttgcctaactgttgcttatatactccgttcagatagttggcggcagctgtgaagatttggttattaaaccggataacattggtttcacttctccggttggtagctaatgtcttgacgcggatcgggaaatgttcgatgtgattattcaggctgttgagaattccccaatcgccatttcgccaacgataaatggattgtttaacgtctcctacaatcaaactgtctgctccttgagacaatccttccagtaagagcaatttgaaatttccccattgcatccggctggtatcctgaaactcatctatcatgacgttatggatattcgttcctatcttttcgaatacaaaagaggagtcaccgtctttcaccagttgatggagcagggcattcgtatctgataatagaaaacgattgttgtcgtgattcaactgacgtacttcttcatcgatattggcgaggagttgcactttgttgagatgttgcagggataatcggcaactattcagtaacaaattattcttggaacgtaacttttcagcatcttccagaatttgcatgagactagagttggctaaattaatgatgtccgcgtagcggggagaagtcttggttgcccagttctttgcgtcttccagacatttttctactgtagcattacggatatcattgcctaaaataccattattaagtttacgaaaataacttccgattccgcgtgaaccgtttttcagatcatcagcagtcagtgcgtgtccatccagttctccttcgaattggtcgtagaatcctttcatttgctccagaatttccgtttccagcgctttcagttgcttgcgatactctttgatggtatcagggtttcgtaaccgttgccggagtccttctcccttttcaatataaccttcatcgaaaatattgcgtccgaaactttttacttcgtccgacacgttccaacgtttatcgtcggcaattcgttcgttgatataatcgagtaaccatgcgagaacgggagaagtgggtcctagtttctcaatcatgctatctacagcgtcactaagaacttcggtgttatttaactcaatattcagattcgggctaagttccagttcccgtgcgagattgcgcatgacagattgaaaaaatgagtcgatagtctctaccctgaaccggctgtaatcatgcagcatatagctaagggcgacgcctgccgcttcccgtatctcctgttcggtttttcctgtctcttctttaattcggttgaggtaggcttcggaatctttatcgcctatctgtatgccgtaaagctgactaagaatgcgttctttcatttctgcagttgccttattggtaaaggtgacagcgagaatttgccgataggcacggggattgagaatgatcagtttgatgtattccacggccagggtaaatgttttacctgaacctgcggaggctttatagactaaaagttcactcatgtttctgtttatgggatatattcgattttagcaacaatgactcgtatatcctccggttctttccctgcctttaccaatgcctgatggaagtttttggggaagaacatgaagaatgtgtccggggtggaatctacatattttattttcttggctttgtagaaagttacatccggtttgtattcggtgataggctctgcatattctgctgaagtaattccgaaacgttcggtgcctttcactacatattgcagatcaataccatgacggtgtgcttcgattttacgtttactgacatcttgtgttgttgcatcctgtacattgatgtaacaatgttcgccatccacttcatatcgtccggcaggcatattcgcaaggtcgtgggtagctagccattggaaagtcttgtcccacactttcttattcttatgatattgtgacgcaaattcctgataatcggttgttttatgaggcattgccttcagtccgtttgcccattcttgtttttgtgtccattgacgggcttgtttaagagtccagttatcagcggattcttgtgaacacacgttttcagtgaagaagaaaagaaaaagtccgataaacaggcttgaactactaaatacgaattttgatttcatgattgttcgaaaaaattaggtccgaaaataagtatgaataaaggtagatagtcttttaaagctactcgtaataactttaaggcttgtccaatcctgtaattaatcgtttgtggagatacattcagcttctcggcaatttctttatgtgtcagatgttgattgcggttcatctcgtaagcttcgagatattctttcggaagtttttttagtgcttcttcatataagcggaaaagctcatcactcaaatagaagtccggattattgaactcactatcatatttatcaacgatttcctgatgtacttttcgtttgatctcaaaatgggaaagacggttgagagctttgttcttgacaatcgtaaaaagaagtgttttgagtgtcagctcttccataagagtgcaacgattttcccacagccacatcattgtttcttgtacaatctcctctatttcttcctgctcgcctacatattgggaacaaaaagcacatagcctacggaagtaatgtctgtagacgacgtcaaaaactttttcttctcctgcttttagggcagtgataacggacttattattatttatatccaaatatatcggagattgtgacattctcttttaatttatgtaagacaaaaataatgaaagaagtagataaatgaaataaaaatgcgagaaaaaatatttttttctttttctctttagtatatttgtgctcacaactgtattactacaaagatattatagtttttttgtaaaaagataaaagagcatggatgaaactatcttggtgaattacctgcaaggtgaatgtaatgatgaagaagctgctcgggtggaagcttggtgcgaggaagggccggaaaaccggaaaactttggagcaactttattacactctctttgtaggtgagcgtatagcggtgatgaatactgtagatacagaggcgtcattggatcaatttaaatcagctatcagagaaaaggagaaaaaggctaagcggaaaagtatttcaatccgttggggacgttatgctactgtggcggctgcttttcttaccggactcgtttttgccggtggaattgcctggggattactttctaataagctttcggattatgaggtgataactgctgccggacagagagcgcagactgtgttgccggatggtagtaaggtatggctgaatgcatcttcaaaaatagtttatcataattctttatggagttcggatcgtcaaatcgatttgtcgggtgaagcctattttgaagtgtctcatgataaacatgctccatttatagtaaatagtaagcaaatcaagacttgtgtgcttggtacgaaatttaatgtgcgtgcacgccaagatgagaatagggtagtgactaccttgcttcaaggactggtacgggtagattctccgcgaacggaagagaatggttatttgttgaaaccgggacagacattgaatgtaaatacggatacttatcaagcagagttaattgaatataaccaacctacagatgtgcttctctggattaatggcaagttggaatttaagcaacagtctttattggaaataaccaatattatggagaagttgtacgacatcaaatttatctataaggatgaagcattgaaatcagaacggtttaccggtgaattctctactgatagcactgctgatgagatactgaatgtattaatgcataccaatcatttctcttataagaaagacggacggattgtccgagtgatgaagaaataagagataggttagtgtttctaaaaggctgtctaattagatcttgacagattaaggtttgttcgttatataaagatgtgaagtgctcccaaaagttagatacataactttctgggggcatttcacatatatgtagtggcaaactgattggaatgggatttgattagatagtctttaacacgagaaatcaccctcactacatgactgaactgcactccttaagttttgtgttcaacttttggggtgcagttcattgtaatgagggtgattttatgaacttaaggcctgtttgatagcctctattctatatttttatagttatctattcataaatacttactcacttttgggctcgtaaacattaaattctgtaacatccgtacgaccgtttgtagagatagtaataatctgatatttcagatatcgcgtagtaataggagaaatgaacgtaatattctgtgtaccaccggagattgctaatgaactcaatgatttccatgtcgtaccattttcagactgtaatatttccacttctctaggagcatatgcattggcccaatgattcgttttgatacctgttaaaaccttagcttctcctaaatcaacagtaaaccagaatcctttattatttagagcaacgtcagttccagtcttgccatcgattaaattattgggtgcgccttctactccttcttctacattaataatccagccggcgcgattactgataagttggctattactaggaataccgctttttagattacaataggcagctttattaataatgacaggcaatgtacttaaactactgctaataacagtgttcttatcattggtagttacattactgattgagacactgaaagagaaacttgttttttccatgatactggcaaatatcgtcggatcaaccgtcgcagtgatttcttcagaagtcatctgtccttctttgagagtaacctgtgaggaacttaaaacgatctggcttgcatcaagcccttctgtttcactttttgcacttaatgcgataaccatatctgtagagactgctttctgtgtttttacagtaaaagccatcttaatttcatctcctccgattccattcgcatcatgagtcagattgaacttttttacattccccgataaatagtcatttctctgtagagacacatacgtagcattccactcgttaaaaacgtcttcatcatcgctacaggacgaaatgaacgggacaaacaagccgagtagagttgctattgatagtgattgaaatatatttttcatatgtacatacgattaaattattactatttccattcggtagatttatctgtagataaaataccgtcaatccaggtaggagtagcagaagtagtcaatgtatgacctttgccggttgcatcttcgaatacattgccttgtccttcattgaatcgccaataagcttccaaacctacagatttagggctaacttgagtcatgttattttgaatttgagaagcggaacgaactacagaccagatacgtgcttcactcatcaaaattttacagtttccccatctactataagaatcatcacctaagcagaaccaatttacatcagagaaagttgttgctcctgttggtatactcaacacacccgaatcaactccgtttatgtaaagtcgatagttggaaccatcacagaccaatgctaaatgttgccattcgtttggcttgaaagaattacttggattcaaataaagccggttacgtcctacaatctgtactaatgaatgtgccttataattttcattgtcactttgaggatcctcaaaacgtaaaaggatgaagtttgcatcatctcctccgttcttaaatactgcacggtcacggtcagctgtgttggctacctgaaaacgaacctctatcgtatattgtgaatacgtttcgggagattctgtgaatttattagcttttaaactaggagcgccaacaaacattggagctgaaaattcgataatactttctgccaaaataacaaaggttccggtattttccatcggtgaaatacttccatcttgcaatactagttttacaggcagtgcatatgattctcccgatttcatcatttcctgactgaaagctttcaaagcgatggggagggcatcggctgcatattgtcctgcttttacagtaatcgtttccggcaacgtataataatctttgggcaacattatatatccggttccattaatatggttataagtgtccagtactgattgatctgtaaccaatttataatgattgtctgtagaagaaagattactaagatgcacatttagggtagtaaaactttctccagtagcctgtacggtcactttttgacttgtactggaaagagcttcttcaatataagcatgtgtatctaaagtatcgtattttgcatctccacaacttactatacttcctaagcctgttatgactgcggagaagcataaaatttttatataattcatacgtttcatagtttacattaatttttaagtaatgaatgtgatgacgggttcataatttgaatagcacggcgtatatttttatattctggtgaagttccatactctgcttccatatgataggttcctgcaccacctttacggaatccgttacttggttgccagcgtgccattccttcgagagatttcattttgttaccataacgatcagtgtaatcatatccaccgtccatagcagcatcagtagcctcgaaattctcggtcatgatggtcatcttcgtgatttgttcttcagacatgacactgctatacgtctgaacaagtcctgcacctgctacgccgcctgtgataagacgtttatcgagtttagaatcactgccaggactactattattgtaagcctgaatgataaaatagtcaaaatataacccgacttcaggtctacctgttatgctctgtggttcgccatcgataactaataatttacctgttcctgatttcggaccgaaatatttgcctagttcatcaacaaatgcaaacattctatcgtcttcgtctacgatattaccggggttgccgaaattaggttcataatcgatatcaaagccgtcgtaaccatatttgtttactgtatcggcaatggcgcttgcatatttgcgaatggatgcttctattgcttccttatttgattcatcggaaggccattcccaaaaatcattcacagcttctttttcggatgaaaatcccatattttcccaattttcacgaatattctgcggagtaatttgatcgcctacacttctgataataaaacacatggtaaaacgagttcctttaacttgttggcaaaattgcagatcttttttttgagcttctgtaatgttcgaccaatttccccaaatagaaacaatatctacactatcaggaataccggctaaagagcttttcatataggcaccttcaccactccagccaccaaaccagccaaaggcaacttggtgatctgtctgcttataggcacgcaaggccgcataatattcatccgatacgatcgattcgggaaaagtttttgcttccgactccgtccagtcactgcaaccgatcaatgaggtcgttgccagtgatatgagtacaatgtataataaataaattttcttcataaaagtcctttttatgcattatataaattagttctttttagcccactttaagtcagtagcttcgttatcagcaccgcctagttctgctactcccagatcataattggctttattgttttgtgcctctgtataagggaagcttagacgacgcataccgcgttggctactcactccacaatctgatagattgtcgatacaaggataaagttccggataacctgtacggcgatattcagcccatgcttccaatcctaatggataattggcgatccatttttgagtaatgacacgttggaaattttttccatttacgttatcagcctcactgtcatcccacatcacactcactgtattggtaattgtaacagtagcattttgcacagcatcactttcatgtgatacgacaggagcttcgtcaatcttcaagtattcagtggctgaaacctgatattgttccattgacaaattaataccatcttcgtaataggcttttgctgttttagaaccgacattccaaccacgcaattttccttctgcacgtaaaaaagccgtttctgcagcgcagaaaaccattaatttagaggttgccgtatatgcgggaatagaaaatcctgcagcgtctgcctttttaaaatcagcatctcctgtacgcatacctacatatttatctgttttcccggcaagggtagacttattaaagaacttcggcatacgtggatcgccatatgcattcatataatctacaatatttgcattcacacgcagatcaccccaacttacagctgccagttgatatggattactctgtgtgccacaagaaagcatagcattatccgaattactttcaatcaatcctgctttatgtgttactgctgcttcagctgcctcttgagcaatgccaggccatgttccgctgattcgcattgcaacacgtaagcgcattgaattggctagcttagcccaacctgaataatttccatcaaaaaccggatcattggcccccaatggggcattgccatttgtttctacataatagttgtacaaaacatcagctgcattggctaaatcacttaatatactggtatagacctgttcctgggtatcataagatacatagaaattacccttctttacttggctgtaaggcatcggtccataacaatccgcaacgcgaagcatcgttattgcacgtatcatacacgcaaaagcataataatgtcccgtagaattagttgcttcctgtatttggaaaaagtttccatatattttttcaaacggagtgttccagggggtagcattccaggcatcactctgattgaatgtgctgaagtttgtaccactccatgtgttagaacagcatagatagccacctaactgtcccaccatctgatcttgcatttgagagtcattctgctgaatattcacaattgtttcaatcatagacttcatcaaagtcgcagggtctgcatcatgaatttgatattgattcgtattatactcctcaaatttatcggtacaacttcctgccagtaacaacagagcggcaccgactgtgatatttcttaaatattttctcataacattagctttttcttttagaattgaactttcacattaaaaccgaagttacgcaagctaggttgcataaagtagtctacattcatataatagttactggaggtagaggcagacaattccgggtcaaatggggctttacaataaatcatccataaattacgtcctacaatacccaaagtaacattcgccacatttttaaaccatcttttaggaagtgtatagtttagactcaattcctgcaaacgtacattggttgcactatatagataataacgaccgtagccaccttcacccgtaccaatagtctggtaatacttttgggcgttaactttaccgttattaataggtataccaccattatcacgagctgttgcagatgtttcggatactccataataatctaagataccttgagtagccgaataagctaatccgcctacgcgggctgataatacaactcctaaatcaattcctttataagtgaaatgattggtccatccgaggttgaaatcagcatccagattacctacttttaccggagtgtttgatgaagtgatacccagattaccattctgatcgacttttatattaccgttattgtcttttgtcagttggttgtatacatagatatcagtcatggagcctccttctgtcaggatgacgcgaggagctacattctctttacctaaccaacccacattcatttcatccatttggatagcttctcctgtcacgggattcacgctgccgcttgccagtcgtttcaccttgttacggtttagagtgaaggttgcattagaagaccatccgaatcctgcccatttatcgttgaaccctaaagccaattcaagaccttggttttgcacgttaccagcttgtacaatcgcttgtttatatccggaagaagagggaatatctaccttaaatgtttggttcagtgtgttagaacgatagtaagttgcgtctaaattgaaacggtttccccagaatttcaagttcaaaccgatttcccaggacttagtcttttcaggtttcatgttgtccatcgggtaaacggtcggattcgcccagttatgtgtctggctgttgtattcgtaacccggattagtaaggaaacgatcgaaagaagaggctaccactgtatatgaaccgcgtattttagcataagagatcacctcgggcagtttaaccatttctgataataaagccgataaaccgactgacggataaaagaaagatttctgtttggagaatgcaagttttgaatcccagtcattacgtccggttacggttagatacagttgatttttccaacttaattcagcactggcaaaaatactttgaatttcatcttcatatccggtagggtccggtttatagttggcggagaaattaatattgttgatctggaagaagttaggaataaccaggtcacctgcaatatataactgatccattgaagtatgatatatggaagcaccaacattggctgttaaatgaaaatcaccaaatgttttatctatattagccaggaaatcggcatataaagaacgttcctgacgcatggcatcttcaaaaccaccgcttacaccacagaatgttgttaatgtagaagcagatttttcgtttttattccggtagtcggagttgtccagattgacacgaccgacaacattgagccaatctgcagcctgccatttcaaagaagcgttcatcatataacgtttcttgttggaagtacggttgatgcgattttgtatccaatatggattttgtaatgacaaacttgcatcaccataaggccaatattgttccatatagccgtagttagtattataacgctcatacagacgaatttcgtcaaagttgtctccacgagggaatagatacagtgatgggagaggattataatactgtccttgagaaaccatgtttttgttgttctgaacgatatattgtgcaccgatatccagagtaagtttatcattcaggaaatgggtggtattacgtgccgtaaaattataacggttataggagttattcggaagaattccaccggagttagttgtagaagcagaaagataggtctggtttttggtatttcctgtagataatgctaccgaattgataacattggagcctgtttcaaagaagtcagatgggttatatcgacggtttgtcaattctccccagctgaataatccggaacttgtaccataacggttctgcatatccggcataatatatgctttagagaaagtagtactgttggatactgttatggtagttttctctgtttggccttttttagtagtaattaaaacaacaccgtttgccgcagcagaaccatataatgctgccgcagaaggaccggtcatcatactaatactagcaatatcgtccggatttaagtcagcaacagcatctgatcctcccatctctccaaataatccttcgccaccgctttttcctgtattaaaaataggtacaccgtcaattacatacaatgcattgttatctttagtcagagatttcataccacgcataacaacacgtgtggcaccaccagcaccggttgcaccactattaatctgaacaccggcaacctttcctgatagtgaattcataaaattggcatcttttacagctgtcaattcgtcaccttttacctcttgtacattataacttaacgccttagttgcacgcttgatacccaatgcagtaacaactacttcgtccaatacttgcgtatcttctcctaaggttacttttataggttgtgcgttggcaagcgtgattgtttgggaggcataaccgatataggatacttcaagtacatcacctttagctgcttgtattttgaaatttccatccatatcagtgatagtaccatttgaagttccttttaccaaaatactaactccaatcaatggttctccttttgaatcagtaacagtaccacttgcagtaattggtgtttttttctgctgctcttctttattactcttcgcagaaagtacaatatgattatctactattgaaaaactgacatttactcctctgaataactgattcattacattattcaaagattcttttgttaccttgatagatatgacacgatttatatcgacatcatttgtgttatagactactgacattgaagtttgtttctcaatttctttcaaagcagtgttcaagggtactttcgatagattaagagtgatcgttcgttcttgcccataagctgaagcaaaacacgaaaccaacaaaaggaagaataacaagtatgaaaacttgtgttttataatttctttcatcttattctttttaattagaaatagtttttagagaatttgtaattagaggcggtaaatgagattaccgttttcacacaaaggtttcatgtatctctgtttctcataattaataaatttaaaggttatacttaaaataaattccataagcgcatattcaatagtaatacattttatgttgtaaccttactaaacgaagataagatttttttcgaaaaaaatagaatagaaagattcctaattgaaaaataaatactcaaatatttgataaatagaatcttatgtacttattaaaatcaggctgatttattacatttgcattcattttgcatacaatatatgtatgcattacctattgtatagatataaatattcattttatgttcaaatattcaaaagatggaatttcggttttaaccatattagataccagaagagcaaaaaagagtggacagtttcctgttaaagttcaagtggtatatagaagaaagcaaaaatattactcaactgggaaggaagtgtcaaaagaagattgggcaaggttattaaaggtaaaaagccggttattggcagaaattcgatcagatatagagagtagtttttcaactattaagcaacaagttaatgaactgataacaaaaggagaatttagtattgaaacattaagcgtcaggttaggaaggcagatgaatgatatgactttgcgcagtgcttttcgcttaaaaatgaaagaactggaagcctatgaacaagcaaacacttacctaaattatcaaagtgctttaaaaagtttagccttaattccgcaacactattacaaatataactttttaagtacctgagcaacaaaaagttgctcaggaatttgccatgtcagatttttcacctatcttagtgttgcaaatcaaaatatgtatcaaacccgacagacatggcaaaggtagcaattaaatccgagaaactcactccttttggaggaatattttcaataatggagcaatttgactccagactctcatctgtaatcgactcaaccctcggtatgagatgcaggctgtatggttatcaatacagcgaaatcatccgttcgcttatgagcgtttatttttgtggcggctcatgcatcgaggatgtcaccactcatctgatgtaccacctttcgcttcatccgacacttcgcacatgcagtgccgacacgattcttagagccataaaggaactgacccaggataacatttcctacacatccgacactggcaagacctacgacttcaacacggcagacaagctgaatacactgctcctcaattgcctattgtccacagggcagctgaaagagggcgaggggtatgacgttgacttcgaccaccagttcatagaggctgagaagtttgatgcgaagcctacatacaagaagttccttggttatcgccctggcgtggcggttattggcaacttgattgtcggcattgagaacagcgacggcaacacaaatgtccgtttccaccagaaggacacgctgaagaggttctttgaaaggtttgaacaaaacaagcttattatcaaccgtttcagagctgattgcggctcgtgttctgaagagatagtggaagagattgctaaacactgcaagaccttctatatccgtgctaaccgatgcagttcgctctacaatgacatctttgccctcagaggttggaagaaagtggaattgggcggcattgagtttgagctggcctccattctcatcgagaaatggaaagggaaggcataccgtcttgtgattcaaagacagaagcggatagacggcgaactcgacctgtgggaaggagaatacacctaccgctgcatccttacaaatgactacgagtcttccgagaaagagattgtcgaattctataacctccgtggagggaaggaacgcatcttcgatgatatgaataacggattcggctggaacaggcttccaaaatcctttatgggagaaaacacggtgtttcttctgcttatggcactcatacgcaacttctataaattcatcatggcgaggcttgacgtgaagaggttcggactcaaagcaacaagccgcatcaagacgtttgtctttaagttcatctctgtgccagccaaatgggtcaggacatcaaggaagtatgtgctgaatatctattcatgcaacaatgcttatgccaatgtgttccagaatgactttggataacaccgacaacttatagtcgtgattttgcgtattgcctcaagtcgcatggtggggtaaggggcatttatatgtctttatggtgacattcgatgcactgtgccccctttttactaacgatgcagattcttttcgcttctgtatcatattaggcgcgtagttgcggatttgaggtttagaagatttcggaggttccactatacctttggaaaacattacaattgattggcttaaacgttgtgaaaaattttggatatcagaaggtaaaagctattcaagcataagtatttatttccgagctttaaagtgtgtcttaaatcgtgctgtacatgatggtattataaaagaatcatcttttccttttggaaagaataaatatgaaattcctgaagggtgtggacgtaaattagcacttactctttctgaaataaaaaaagtaatgtcctatcaatgtgaaacaaaagatatagaagaatttagagatctctgggtgttttcttatttatgtaatggcattaattttatggatttattatttcttcagtattcaaatattatggatggagaaatatgctttgtacgctctaagacatctcgaactaccaaacataacaaagagatacatgcaatcattactcctgaaatgtggaatattattcaaaaatggggtaatccaagattaagcccgcaaacgtatatttttaaatatgctagaggaactgaagatgcctttgaaaagattagattggtacggcgtattataaccaaatgtaacagaagacttaaaaaaatagcccaagacattggaatttttcagttgacgacttacacggcaaggcattcttttgctacagtattaaaacgtggaggtgcgaaaacctcatatatttctgaaagcttgggacactctaacttatctgtaaccgagcactatttagcatactttgaaaaagaggaaagaataaggaatgctcaattattgactaactttaatctctagattaatacatttgcatgcaaattgtatgtacaatgaaaaatggaccaataattgatataggataaaagtgagtataatattaaaaaacgcatattcagattatctataatttagaatatgcatcttgttatcaggagtgtttcgaaaaccgcagggatttccactttagccaaacgtaattcaaataaaaaaaaggatgatattattgcaatttattctttttatcgcccgcgtagtgatagaataatatctaatattgataatattaatcaaatgaaaagattccgttctttgtattatcggcactaactagaagaaaacaactactataaagcaagttattattattctttaaatgatttgttaggttccatttaaagaatcaaaatgttccacaccgagaatcacttcgtttctcggtgtggaacattcctgaaaaaacgtcttttatcgaatattcataccgcatatatgaataaaaacaagttgattactgcatattcatgcgcaatcttactaactttttctctcattcattgaatttacttaattgtatttagtctgacatcttaaaaatagaacatctaatctatttatcaaacaagaatagaatttagggaaagtatatgaaactgattttctcccaagcaatcacgcttactagtgcacaacccttgaaggttactttaggagaagatacgcaggtgttggacgaagtagtcgttactgcattaggtatcaagcgcgcaactaaagcattaagctataatgtgcaagaagtaaaaggtgatgaattgacaactgtaaaaagtgccaattttatgaactcactggctggaaaggtggctggcgttaatatcaatgcatcttcatccggtgttggaggggctacacgtgtaattatgcgtggtaccaaatctatatcttcagacaataatgctttatatgtaattgatggtgttcctatttttaatacaaataaaggtgacactaacggacaatattcagcccaaccgagaggagagggcatatctgatatcaatccggaagatattgaaagcatgtctgtattaagtggacctgctgctgcggccttgtatggctctaatgcagcgtctggtgtaattttaattactacaaagaagggaaaagaaggtaaggcacgaattattatttctaataattctactttttccaatccttttataatgcctgaattccaaaattcttatataaaccgcgcaggttcctttgcttcatggggagataaagcgtcttctcttttcggaacttatgagccaaaagattttttcaatactggtactaatatccagaataacgtttctttatctgttggtaatgaaaagaatcaaacttatctgtctgtaggtactactaatgcaactggtatcattcaaaatagcaaatatgaccgttacaattttaccttcagaaatacaacaaaattcctgaaggataaaatgacattagatgtgggttttagctatattattcaagaagatcttaatctaatggcacaaggtgaatatttcaatccactaccagccgtatatctgttcccgcgtggcgaaaactttgaagctgtgaggatgtataaaacgtatgacacaactcgtaagatagatgtacagaactggggatggggtgatcctggatacagtatgaaaaataatccatattgggtggctaatgagatgaaccatggcatgaaaaaacaacgttacatggctaatgccagtttaaaatatgaaattttggattggcttgatgtgacagggcgcgttcgcattgataatgcaaccaatgattattcagataaaagaaatgcttctactgatctttactttactaatagttctatttatggattctataagtactataaagctgacgatagacaggcttatgcagatgtgatggctaatattaataaacgctttggtgacttaagtttaagtgctaatattggcggtagttttactcaaacttattatgacgaaagaggattccaaggtggtttgaaagatatgtctaatgtttttagtctatataatatgactacaactttggataaagatacttatcctatagaaagtggatacaaacaacgcaccaactctatttttgctagtgcggaaattggttggaagagtatgttgtatatgactttaaccggacgtaatgattgggattcagcattgattaatacagaacaatcatctttcttttatccatcaatagggctttcaggagttatttccgaaatggtaaaattacccaaagctattacttatttgaaagtacgcggctcatttgcttcagtaggtgctcctattcctaagaatctttcttccaacaaaacgtatgagtgggaccctgcgactagtcaatggaaattacaaacttatcgtcctttgcctaaactttatcctgaacgtactaattcttgggaagctggtttgaatgccaaattttttaataatagtttaagtttggaagttacctggtataaggctaatactcgcaaacaaacattccaagttcctttatcaggaaccgctgtatatgcgactatgtatgcgcagtctggtaatattgagaataaaggtatggaattttctttagggtacaataaatcatggggagatttctcgtggaattcaaatttgacttttagttttaataaaaataagattgtagaactcttggatgatgcagtggatgatgaaggtaatcactatagtttgagtgagatagataaaggtggcattggatcggctaaagttattcttcgtaaaggaggaagcatgggagacatgtatgtcactaatcgtttgaaacgtgataatgaaggaaatgtatatattgataaagcgagccagaatgtgaagaaagaggatataaagaattcggatgaatttattcatattggctctgtattgcctaagagcaatttaggctttagaaatgatttctcttataaaggcattagcttgggattcatgcttgctgcccgctttggaggtattgttatctcaccaacacaagctgtaatggatcagttcggagtatctaaggtcacagctttagcacgtgataatgaaggtgttcctgtaaataatggaaaagtggatccccagacttattatacagaagtgggtggaataagtggattgatgtctaactatgtatatagtgctactaatgttcgtttacaagagttatcggtgggctactcacttccagccaaatggtttaataacaaatgtaatcttagtttgtcaataacaggtcacaacttgtggatgatttataataaagcaccatttgatccggaagctaccgcttctactggtacttattatcaaggtgttgattactttatgcaaccaagtttgagaagttggggatttaatgtaaaaatacagttttaacgataaaagaataaccaaatgaaaatatataaattcataacgcagatttctattgcaggctgtatgcttgttggaactccaatgttacaaggatgcatggataatagcttgaatgatccgctgggaaaagtttcggaagaagaacttggacgagatggatttgctgccaatgctttcttcttgactttatgtgattatgcatatcccatagctactgaaaacatttataataccaatgaatccttgattggtgactgctatggacgttatcaagtaatggcaacagataagtttaaaggggcaaattttgctacatataacgcacccgagaactggttaaactggcagtttgcagatgataatgtaatggtattgacgtatggtgcatggaataaaataaagaatgtaacccaaggaacaggagttaactttgcatgggcacagattttgagaattgcgacaatgcatcgtatgcttgatatgtatggggcacttccttattcccaaatttcaagtgataaattttcggctccttacgatacaatggaggaagcatatcatgctatgtttactgatctgactgatgctattaatgtaatgactgtttatgtgaccgaaaatccaaacaacagaacgatggctaagtatgataaagtttatgacggtgactttgagaaatgggtgaaatttgcaaattcactgaaactacgtatggccattcgtattcgttttgcagatcgtgaatatgctagacagatggcggaggaagctattaaccattctattggggtaattacttctaatgaagataacgcaacttctttaggtactaaaaatcaattgtatacggtattggtacaatggcccgatcaatgtgtctctgcggatattacgtcctatatgaaagggtataacgatccgcgtatgtcgaaatattttaaaaagaaaacgagcgataaaggagatgatgattatgtggggatgcgtgcaggcttgtcttatggtaatgatattaccggaccgactttctctagaataaatgttggagagatggatcgtactttatggatgagtgcagctgaaacagcttttaataaagctgaagcggcaatgttaggatgggatgtaaaaggagaaacggtgaaagatttgtatgaatcagctatcagactttcttttgcacaatggggagtatcggatggtattgaccaatacctgaatgatgaatcaagtactcaggctgattatgtagatcctaatgagaataaggggaatgaaagtgctattagctttataactatcaaatggaaagatgatgctggtgaggaagaaaaactggaaagattaataacccaaaaatggattgcaatgtggcctttgggacaagaagcatggagtgagtatcgtcgtactgggtatccgcgttttttcccgttattgaatggaaatgtaaccaatcttccttctgctaatcgtattccgttcccaccatcggaatatattcgtaatgctgctaatgtaaatgctgctgtaagtaaattgggtggcgctgataattatcagactaaggtttggtggcagcgtagggataagtgaataatagtataatctatattaatataaatagtatgagaaagatattctattttataatgttgttatttggcataacggttgcgaatacagcgtgtgatgattggacagacatggaaccaaaattccaggaagatatgactcagtcgtcacttccggaagaatactatgcccagcttcgcgcttataaaaaaacagatcatccggttgcttttggatggtttggtaattggacaggaaatggagctaccttagaaaaatgtttagctggacttcctgatagtgtagattttgtttctatttgggggaactggagacatttgacagaagcgcaaacaaaagatttgcgttatgtacaaaatgtaaaaggtactaaagctttgatgtgttttattgttcaaaatatcggtgaccaattgactcccgaggaatataaagataattatctggaattctggggatggaatgagaataaggaagaagctataaagaaatatgcccatgcaatatgtgatagtattgataaatatggatatgatggctttgatattgactatgagcctaattttggtcatcgaggtaacatgagtggaagtgatgagaatatgttgttgttcattcagaccttgggagaaagaatcggaccaaaatcgggtacagacaggctattagtaattgacggtgagccacaaagtattgtatcggagtcaggtccttattttaattattttatagtgcaggcttatgattctccaggagataatactggacgtgaccatttggatagccgtttaaactctacaataagaaacttcgatgggcatttgactgcagaagaagttgctaagaaatatattgtaactgaaaattttgaaaaatgggctttgtctggtggtgctgatttcacagatcgatatggaaataaaatgaagtctttggaaggtatggcacgttggacgcctattattgacgggaaaaaatgtgtaaaaggaggggtcggaacttatcatatggagtatgaatatacaattgatggtacagaagaatcttatccttatttgcgtaatgctatccgcattatgaatccaccggtaaaataataaatttaaagatataataattatgagatatctggtaaaaaataaaaatacaataatgttcgcctttgccatattgctttgtgcaattatagcaagttgtgaagatgcaaagtatgatactatcggcagtagaatttatttagctgaatccagtagtttgtcttatgaatctaaaaaagtaacagtagctgaagagggtagtgttgtcactgtgactcctcggtcgggacaaattgcaacagaagatatagaagttactttgggactaagtccgaaatcgttggaagtatataatacaaaaagtggtacgaactataaatctatgccggaaggttcatattcttttgatcaaaagacagtggttataaaaaaaggagaattagtggctcctactgttaaagtaacaattgatccgttgacaaaggaaatgcttgattctggtgataaatttgcactaccggttgctattactgctgtatcaggtgggcaacaaactttggaaggtgcagatgtgatgatttatatcatggatcaggttattataacctctgcaccagtgttgacgggtacaaaaccaattactatggaaatgcgtcaggattatacagtaactcaatggtcacttgaaatgcgtattaatatgagcgaacttggggatggggtgactcctggagttggttatcctggtcctcctagctatcagaatcaagcaatattttctgcaggtccaggtaatggtatcgcagaagatggtgaaatttatatccgttttggtgatggcccgattcctggtaatattttgcagataaaaacacaaggtactcaagtaaatgctgctactaagtttaaaaataatcaatggtatcatttagcatttgtttgtgatggagtgaaattgactatttatgtaaatggaaatattgatgcaacattagatcttccaagaaaacctttgcgtcttgttaagaatagttttggtatatgcaatggtgattggatggttacagatgctatagttagcgaagtacgtttttggactactgctatttcacagtcgcagattcagaataatatgtttgcgataaatccgggtacggatggcttggaggcttattggaaattgaatgaaggggcaggaaccgagtttaaagacgcaactggtcatggaaataaagccacggcgcctaatggagttgtcagatgggtagatggcattagatcagatggtaaataatataatattcaaatgatgtaattatgagattgaaaaatataatatggaaaacagtagtgatgtcattaatggcatcaccactgtgcatctcttgtgacgatgatgacgaagttactgtaaattctaagttttatctttctacgaaagtttttccggtagattcttatgaagcatcgttgtcagtgattttgaagataattcagtggtcgtaaatgagttacaacctaattatcggtttgttgcatgtgccacggagagattatcgaaagatgtgaaaataacagccgatagtgatgataatctagtaagtgcttacaataaagctaatgatacggaatataacatattacctgctgaaaattattctttcaccaataaaactgttactattgaaaatggagaaagtgtatctggagattctataaaaatagagctgttaaatgtaggatcgttgactacagaagggggatatttgttgccagttaccatatcttctatagaaggtaataacttagatgcacttagctctaacagaggagtagtttatgtgaaaattcaaaatattcatgtcaatgtagagtccgggcaaccggctgaaggtactttgattgccgatcgttctggctggactgtaaaagttgccccgacgactcgtggagatgctaaaaatctaattgatggaacaaattctgatgtagctcgtgatggaggagcagaatattggttaactgtggatataggtaaggtgcagacattaacaggaataagaaataagtgttatgctagtagttattcaccgactgcagtagaagtatttacttcaggtgatggaataaaatggaaatctatcggaactgtaactatttcaagaagtggcacacaatatattaagttttcgaaagctattgaaacgcgttatttaaagtattatgtgaaacaaggtcccaatacggtcagccttacggaatttgacctatatgcgaaatagttaataggttattgaattttttaagtcccgctttttcgttttttcggataaagtgggacttactatataagttaataaatgaaaaaagaaaaagattgattgtttaatagtatcatattgattgtattactattatataataacttttaatagcaagaaaaacatgaaattatctattattctacggttctgtttatggtttatgggaattagtgtggcgtttccgtctctctctcaaactatgttagtaactaatgggaatacaagttctaggatcattttgaaagagaataatcaaatatcgtggacagctgcaaatttgttacaaacatttattcaaaaagtaaccagttgtaagctgcctgttgttataagtcaaactcctcgaaaaggagatattctcattggtggtcaatctccagcggaagtaacagaggatggattctctatttctactcaagatggtattctaaaaatatctggtaaagaaaacggtgttgtatatggggttgttactttattggagcaatatttgggtatcgattattggggagagaatgaatattctcttaccccttcaaaaacggtgaacttacccttcattaataaagtcgaaaacccgggctttcgttatcgtcagacacaatgttatgctatccatacagactctatttataagtggtggaatcgtttagaggaaccgaatgaagtgtttgctgccggttattgggtgcatacttttgataagcttctgccttcatccatttatgggaaagaacatccggaatattattcttacttcaaaggaaaacgccacccgggaaaggccagtcagtggtgtttgagtaatccggaggtttttgagattgttgctcaacgtgttgattctattttcaaagtaaatccagataaacatatcatgtctgtaagtcagaatgatggtaattatacaaattgtacgtgtgatgcttgtaaggcaattgatgattatgaaggagcattatcaggaagcatcatcacttttctgaataagttggctgcccgttttccggataaagagttttccacattggcttatctatatacaatgaatcctccgaagcgtgtgaaacctttgccaaatgtgaatattatgttgtgtgatattgactgtgaccgtgaagtaactttgacggagaatgcttcgggaaaagagtttgtgaaagccatggaaggatggtctaagattaccaataatattttcgtgtgggattacggtattaactttgataattatctggctccatttcctaatttccatattttacaggacaatatccgtcttttcaaaaagaatcatgccaccatgcatttctctcaaatagcagggagcaggggaggagattttgcagaacttcgtgcttatttagtgtcaaagttaatgtggaatcccgaagttaatgtagactcattgatgcaacattttctgcatggatattatggtgaagcagcgccatatctttatcagtacataaagataatggaaggcgcattaatcggtagtggacagcggttgtggatatatgattcacccgtatcacataagtatggcatgctaaagcctgctttgatgcgtcgttataatcatttatttgatttggctgaaaaggctgttgcagcagatcccgatttcttaaaacgagttcaacgggcacgtctgccaattcagtattcagaactggagattgcacgaacagagacagaaaaagatttggtagatatcaataaaaagttagacctttttgaggaacgcgtgaaagagtttcaagttcctacattgaatgagcgttccaattcaccggtagactattgcaaattgtatcgtaaacgttacatgccgcagaaagaaaaaagtttggctttgggtgcaaaagttacttatctaattcctcctacgggaaaatatgcggcattaggaaaaaacgcattggttgacggtttgtttggtggagcaacctttgttgatagctggattggttgggaaggaaccgatggtgcattcgttatagatttgggcgaagcgaaagagatacaaagtgtggaaacagattttcttcatcaaataggggcctggattctttttcctctaaaggtggtttattcatatgctgaagacggtgagcattatacacattggaaaacgattgatttaccggaagaacgtaccggtgaggtaaaattccgtggagtcaaggctgaatcagccgaaccgataaaaactcgttatgtgaaagtagaagtcactggaacgaaagaatgtccgacttggcattatggtgtaggtcatccttcgtggttctttatagacgaagtgataataaaataaaaaaagtaggggggagacgttagtagtttcccccttttagttgtattatatatagatgggtcagaaaaatgttttttttcatctatatactatgatttatgcaacagaataaaactgcttctcaacgaaaaactattaacccggcttgctgggtacctactgcttattttgcaatgggacttccctttattgctattaatttggtttctgttttcatgtttaaggatcttggaatttcggatacgcaaattgcattctggacttctctgattatgatgccttggacactgaaatttttgtggagtccttttcttgaaatgtatcggacgaaaaaattcttcgtattgattacagaattattgagtggtgtattgtttggaatagtagccttttctttgtttttcgattactttttcgccataagtatctctacgatggcagtgattgcttttagtggagcaacgcacgatattgcttgtgatggtgtatatatggctgaattgaacaaagaagatcaggcaaaatatatcggagtgcagggtgccttctataatgtagccaaattggttgctaatggaggattagttgctatggcaggagcattggcagagcacttcggagcaatagaaggtgcttcgatagatgctaacaaaggagcgtattcatctgcatggatgattattttcagcgtaattgcggcaataatggtactgatcggtatttatcatataaaaatgttaccttctacacaggttccgtcaacaacgaagaaaacagcatcagaagttgggcacgaactggtagcagtcattgctaacttctttactaaaaagcatattctctactatatctgttttattattttatatcgtttggcagaaggctttatcatgaaaatagctccgctgtttttacgtgcttcaagggatgtaggcggcttaggactgtcgttaacagagatcggcacgctaaatggtatctttggttccgctgctttcgttttaggctcattgttagcaggtatttatgtctctaagttcggattgaaaaagacactgttcactctctgttgtatttttaatcttccgtttgttgcctatacttttttggcagttgcacagcctactaatgtatatctgatcggaacttgtataacaatggaatattttggttatggctttggttttgtcggattgacgttgtttatgatgcaacagattgctccaggcaaacatcaaatgtcacattacgcatttgcttcaggaatcatgaatctgggagtgatgcttccgggaatggttagtggttatcttagtgacttattaggatatcgtaatttctttatctatgtgttaatcgcaactattccagcttttctgattacttatttcatacctttcacgtatgatgactcaaaaaataaataatataaaatcaacgattatgaataaaattcaaattccttgggaagatcgtcctgtcggatgtacggacgttatgtggcgttactcacaaaatccagttatcggacgttatcatattccttcatctaatagtattttcaatagtgctgttgttccttttgaggatggttttgcaggcgtattccgttgtgataacaaagctgtacagatgaatatctttgcaggttttagtaaggacggaattcattgggatatcaatcatgaacctattcagtttaaagcaggtaacacggaaatgattgagtcggaatataaatacgaccctcgtgttacatggattgaagaccgctattgggtgacttggtgtaatggttatcatggccctacgattggtattgcctatacttttgactttaaggagtttttccagtgcgaaaatgctttcttgcctttcaatcgtaatggtgtacttttcccgcagaagatcgatggcaagtatgcgatgttgagtcgtcccagtgataatggacatactccgtttggcgatatatacatcagctatagcccggatatgaaatattggggtgaacaccgctgtgtaatgaaagtgactcctttcccggaaagcgcttggcagtgtacaaagattggtgcaggttcagttcctttccttacagatgaaggctggttgctgttctatcacggtgtaatcactacttgtaatggtttccgttacgctatgggatctgccatattggataaagatcatccggaaaaagtcctctaccgtacacgtgaatatctgcttggtccggctgctccttacgaacttcagggtgacgttcctaatgtagtattcccctgtgctgctttgcaagatggtgaacgtgttgctgtttattatggtgcggcagatactgtggtaggtatggccttcggatatataaaagagattatcgattttacgaaacgaacgagtatcatttaataaagatatgaaacgtattatattaacttacacacttgctttttcccttctttccgcctatgcgggggaaggggggagccctccccttaaaaatacggataaaagtcttttgatagattatgtggatccttttatcggaactacaaatttcggaacgactaatcccggagcgatttgccccaatggtatgatgtctgtggttcctttcaatgtgatgggatcttccgaaaacacatacgataaagatgcccgatggtggtctacgccttatgaatatacaaattgtttctttaccggatatgctcatgtgaatttgagtggagtcggttgtccggaattaggttctttattattgatgcctactaccggagaactgaatgtggattataaagaatatggtagtaagtataaggatgaacaggcctcaccgggctattattctaattatctgactaaatataatgtaaaaacagaagtttcggctactccgcgtagcggtattgcccgatttactttcccgaaagggaaaagccatatcctgctgaatctgggggagggattaacgaatgagagtggcgctatgcttcgtcgtgtaagcgattgtgaagtggaaggagtcaaactacttggtacattttgttataatcctcaagctgtattccccatttactttgtattgcgggttaagaagaatccttctgcaacagggtattggaagaaacaacgtccgatgatgggtgttgaggctgaatgggataaggatcagggaaagtataaactttatactcgttacggaaaagaaatagcaggagatgacattggtacttatttctccttcgatacagaagaaggtgaacaggtagaagtgcaaatgggagtttcttttgtaagcgtagaaaatgcccgtttgaatctggatcgtgaacaggctggaaaggattttgagaagatccatgcggaagcacgttccaaatggaatgatgacttgtcacgcataacagtggaaggtggtacagatgcccaaaagactgtgttttatacagcgctttatcatttgctgattcatcctaatattttgcaggatgtgaacggagaatatccggccatggaaagtgataagatcctgacaaccaaaggtgatcgctataccgtattttctctttgggatacttaccgtaatgttcatcaattgctaaccttggtttatccggaacgtcagatggaaatggtacgtacaatgcttgatatgtatcgtgaacatggatggttgcctaagtgggaattatatggcagagaaacattgacaatggaaggtgatccgagtattccggtaattgtagatacctggatgaaaggtttgcgtgactttgatgttgatttggcttatgaggcaatgtacaaatctgctacattaccgggggcagaaaacttgatgcgtcctgataatgatgattatatgtctaaaggatatgtaccccttcgtgaacagtatgacaattccgtctctcatgcattggaatattatattgctgattttgcactgtctcgttttgcagatgctttaggtaaaaagaaagatgcggagatgttctataaacgttctttaggatacaaacattattatagtaaagaatttggtactttccgtccgattctccccgatgggacgttttatagcccgtttaatccgagacaaggagagaactttgaaccgaatcccggttttcatgaaggtaattcctggaattatacgttctatgtaccacatgatgtatatggcttggcgaaattaatgggtggaaagaaaccttttatcgataaactacaaatggtttttgatgaaggactttacgacccggcaaatgaaccggatattgcttatgctcatttattctcatactttaaaggtgaagaatggcgtacacagaaagagacgcagcgtttattagataagtactttacaacaaaacctgatggtattccaggaaatgatgatacgggaacgatgtcttcctgggctattttcaatatgatcggtttttatccggattgtcccggactgcccgaatatacattgacgactccggtctttaataaggtaacgatccggttagatccgaaatggtataaagagaacgaattggtgattgaaaccaatcgtactcaaccaggaactttatatattgataaggtactattggatggcaagaagttcaataaatatcatatcacacatgatgaacttgttcacggcaaatatttaaagtttgatttgaaataacacacagtgtttcataggtatcgtttttgggttgacagggctgtcggactttttatagtccggcagcccatttttttacatttacttctgttattacttcttcgaaaatagtgacggtatatgcccgggatagtgacggtatcggaccaagatagcgtcactatttgtcttggataccgtcactatcttacttttattaaattatactccgtagtatttttagttattctctgttttataggtgattacaaaaatctattccatacgtctactatgtaaatcgtatgcaataaaataaaaaatgagaagaaatttatttaaacatatcctttggatattgatacttgcagagtgttttcctctattggcaattgccggatcgcagcaaaaggaacaacgttataaaatagccgtatgtgactggatgattctgaaacgtcagaaaatcggttcattccaattggtacatgaattgaatggtgacggtgtagaattggatatgggtggtcttggcaagagggaaatgtttgataataaattgcgtgagccccatttccagcagttatttcgtgaaactgctcaaaaatatcaattagaagtttcttctattgctatgtccggtttctatggacagtcttttctggagcgggctaactataaagatttagttcaggattgccttcatgccatgaaagtgatgaatgccaaagtagcctttcttcctttgggaggaatcaaagccggatgggaaaagattccggcactacggacagaagttgtaaaacgcttgaaggaggtaggagatatggcagcttctgaaggagtggtgattggtattgaaactcaactggatgcaaaaggagatgtgaaactactgaaagaaattaattctcccggaatcaagatctattttaaatttcaaaatgcattggagaatggaagggatttgtgcaaggagctgaaaattctggggaaaaagaggatttgccagattcactgtacggacacagatggagtgactttaccttataatgaacgattggacatgaataaggtgaaaaagacgctggataagatgggatggattggatggctggtagtagaacgttcgcgcgataaggatgacgtgcggaacgtgaaaaagaattatagtacgaatattaagtatttgaaagaggtgtttcaacagagataggaggatattatgatatagttaatattacaaagagagagaaaaaaatgcaaaatctattttttttattcttttaagtgattacatattttttgattgtacgtctttccttaaaagatcttttagattttgaagatataatatattatttttgtttaaattaaaatttaatctatgaagagtaaaatgaagattaaaatgaagattgccggaaagttatggggcttgtcagcaattcttttattcgtttcttgtgctaaaggttttgatgataatgaaaccttttctggaggtgtgacaaatgcacagttggaatctcctgaaaatataagtttctctaccttaactaatgctgatgggtcagagagtttgaagctaacatggcctgttgttatgggagctggtggttttaaggtaaatgtttataatatgaacgatccagttaatccagttgcagtaatagcagatagtatagtagacgggagttcaatggtattcccgaaattagaagatactaattatcaggtcactgtacaaacaatgggtaatgaaaaattaaataataaggatgctcaaacagctactattcaagattacaaagcatttgcggcagttgcaactattcataaaaacaatgaaattgcagcttatgttaatgctaatattcaagattttagccaagatcaggagcagtgttttgtattggagccaggaggagtttatacattagatgatatagctgattttaagttgaatacagtgacattccgcggagacaaagacaatcgtccgactataaaagttggtgccaatggtggacttgtgacacagggaggtttaaagattaagtatattaattttgagtgcacagatatgtcctcacaaaaagggattctttgtttaagcgaaaatccggatgcttctattacgactgatgctttagggtatacaaatgatggagctaattcaggattttatgtgattaacagtcctattatatttcaagaatgtaattttagaaatattcctaatagtttgatttatggtaataaaaagaactatggtgtgaaagatttccgtattgcaaattgtattgtacaattgaaaaacgagggttcatattctgttatcgactttaatggtggtgggtggattaaagacttgcgagttgaaaatagtacattttataatttgaatactacatgtagtggttattttgtacgctatagtagttctagtaatgctcaacctaaaaaaacatggggaaatacagataataccggtagtataacaattacctataatactttctgtaaaacaatggcaaataaagattttgcgaatcaattacctaatacaaatactttaaccactactatacaatataatattttttatgattgctggcgtttatatcaagcgatacagtcacaagctaaaagatatacagatggtaatactatttggggaataacaagggcttctgaaaataatgacactggaggaagaacggattcaaatggcaaaccttatgcaacacttgaggaccctaactttaaaggacctattgatcttagctttgaccttacacaagctaaaggtggagttgattttaagcctaatgctagtttagctacagaaaaaaaagcaggtgaccctcgttggtatgagtaatattaaatgtaatatataatacaataaagatgaaacataaaaataatataatcaaattgtgccttggcatatttctggctttcacaatggctttacctgctattgcccagaaaacacagacattcaaaggtgtagtggtagatacgacgggggaacctattattggtgcttctgtgaaggtggtaggtacaactactggaactataactgatttggatggtaaatttatggttgttgttccatctggaaaacaggttgaaatatcttatatagggtatataacacaggtattatcagattttaagcagactaagattgaactgaaagaagatacgcagcagttagatgaggttgtagtggtaggttatggtacgcagaaaaaagcgcatctaacaggagctattgctactgtacctatggatgatattcaggatcttgcttccggtaacttggcaagtacgttgagtggtatggtaaatggacttagcgttagtggtggagatgcgcgacctggtgagaatgctcggattaatattcgtcaaaatgatgttttatcagatattggtggtactgcttcagaaccattatatgttattgatgggtatatttatcctgtagaagtgaaaattggtgatgttacagaaaacttaggagcaactgcatttaataatttggatccgtctgtaattgaaagtatttcggttttgaaagatgctgcggctgctgtatacggtgctcgtgctgccaatggtgttatattggttactactaagagaggtaaacaaggtgcacctaagatctcatatagtggaacttttggcgttgtggatgaggtttcgcgtgctaagatgttgaatgcttaccaatatggtcaactttggaatgctgtacgtgcggctgatccgactgacgtatctattaatttgcaaaatgatttgtttcaggcagacgagttgaatgcaatgaaaggtttgaattatgacttgttggacaaatactggaaagcggcattgacacaaaaacatagtatcaatatgaccggtggttcagaaagagctaattattttggaggaatatcttattttgatcaagatggtaatcttggtaatctggattataaccgttggaactatcgtgctggtgttgatgtgaagattagtaaatggttaaaagcaagtcttcaggtttcaggtgactatggaaagaaaaacaaaccgaatgtgaaggttggaggtagtaatgacgagaaagactataatcttctgttagttcgtccatattatattcctgaagaagtgaatggtattccaatcgtgccttatggtattagcaattcacaggtaagttcttcgcaaaactattcattttctctgcttcaaaacgcaggggattataatagaacagaaacatcgaatatgaacattaatgcggggctggaatatgattttggatggaataaatggttgaaagggttaaaactaaaattctcttattcaaagagtatcaattctacaaaaaacaatcaatatggttcgtcatatgagctttattatatgtccaaacgtgctggaagtggaaatcacttgtatacacctatccaagggcaggaatctctttatgaagagttgctggcagaaaacaatttcttactagctaataatggttctgctataaacaatgccagtggggatccttatttgtctcgtacaatgagccgtgctgataattatcagatgaacttcactgcaacttataaccgtgattttggtagtcatcatataggtgctttgttttctattgaaaaatcagaggctgaaagtgaatatttagtgggacaggttactaatccttatgaatttaccaatggacaatcgaatctagttcaatataatagtgcatctactacagaatttaaacgtgcagagtctggtacattatcatatattggtcgtgtgaactatgcatatgctgataagtacttgtttgagttcctgcttcgctcggatgcatcaaccaagtttgctcctgaaaattattggggagtttttccttcagtttctgctggttggattatatcacaagaagaatggtttaaaaagagtgtgaaatgggttgattatttgaaagtacgagcttcgtttggtttaacaggtcgggataatacgaaagcatggcaatggatgcagaactatgcggttgataaagataaaggacctatatttggtgttaatacatcaacaaacgctggtaatcatataactattaataaagaaatatccgctgtaaaccgtgatgcacactgggataagtcatataaagcaaactttggtttggatttcaatgtgttgaataaccgtttatcattcaatattgatggttattatgagtggaatcgcgaaatgttactcccatattcagcttctattccaggtacagtaggaacacagtctgcgaattttaattatggagagttggacacatatggtatggagttatctgtgacttggagagataaaataggaaaagattttaaatataaagtgtctgtgaataccgggtatacggataataaggtacttatgatggactgggaaaccaatcaacgttatatgaagattcatgaaggcagtcgtaccgatatgggaacatggggaatgcagtgtcttggtatgttccgtagttatcaagatatagatgaatatttcaccaaatataatattacatcatatatgggtatgactaaggataatgtaaaacctggtatgttaatatataaagatattcgtggtgcagaacagaccgacggaacttatgctggaccagatggagttgtaagttatgaaaatgatcaagttcgtttgtcaaaccgaagtaatccttatggtttcactacaaatttgagtgcagaatggaaaggtatttctttgtctgcacagataagcgcaagttggggaggatatagttttgtcccaacatcggcacttaagatcggtaatatggttggttcaggatcgggttcgtatacagacttggaatataccaatatgccatccttctggaatacagataatatgtttgtttataatgatgtagttgatgcgtcaggtaatgtggttgtaaaagctaatcgcaatgcaaaatatcctaacttaagatggggtagtgttaatagtgtgaattcaacattttggagagtgagtggaactcgcgttagcatgaatcgcttaacattagcatatgccataccatcgaagtttacaagattgataggtatcgaaagttgtcgttttaatgtaacaggacaaaacttatttagtttctataatccttatcctgataattttatagatcctatgacttcttatggtagttatcctactttgcgtaagtttactattggtgtaaatgtgacattctaaaaagaaataacgatgaaaagaaaaaatataatagctttcagtgttgctttaatggcgataggtgctttcacttcatgtagtgacgagtttctgcaagataaaaaaaattacgactatgttgacgcaagtacatataatacattcagtggcgcaaaagcacgtgtagatgatatatatgcttggtgcttgcctaatacgagttccgaaccaagttggaaatacaatagtaccggagcagccgatttacagtctaagtctacagaagagtatagtggattcggatcattcgtagatcctgacgctccgatgaccagtcagagtggaaacaatacggttcctgattattttcataatagtggtaataatattcaggcaagtgtttggggacgtattcgtaattgcaatgatgttatttacggtatagagaatagtactctttcagaagaagaaaagaatgagttactcggacaggtttatttctttcgtgcatggtgttactacaacttagtgaaatggtatggtggagtgcctataattacggaagtacaggaaccagtggcaggggctatcactcctcgttctacaacaaaagcgtgtgttgattttatttgtgaggatttagagcgttcagcgcagttacttgctccgtttactgaaaatggaggatggccttcaagtgattttggacgtgttacttccggtacagcactggcattgaaaggacggactcttttgttatatgcaagtccgttgtttaaccgtaaaaatgatgtagaacgttggaggaaggcttataatgaaatcactgctgatttacccagaataaatgcttgtggatatggtttagctaatgaaagtaatgccggagctaatgcttcaggttgggcgaatgttttttcaatggttgatggcaatacagaagctgtattcgtaacgctatataatgatatagccactggcggagtacctgattttagtaaaaacaactcatgggaacatggtattcggccatcaaatgccatgggaggtggtggcaaaactccttctgctatgatggttgatatgtttcctatggctgatggaaaaagaccttctatgtgcaatacttatactacactagagcaatcttctgttgcttatgataagaatgttccatttgccaatcgtgatcctcgtttttatcggacatttgctttccccggagtacgctgggctttcagtggtgatcctaagaatgcaagcaataataatccttatacaggggataagtataatttgtggaactatgtttggtatgctaatgagagtgatagagataatgaagaggctagtagctctaatacttatggtgcggataacttgttgacaaatgctaaaggtttctatatacgtaaacgttcggatgatttagatgtgaattcgaatgccagatataaatttactcaagcaaatggttttaaatttagtggtagcccatatttggagattcgttatgctgaagtgttgttgaattatgcagaagctgcatgtggtgctggtgaaatgggagtagctgttgaacaattgaagaagatacgtgctcgtgtaggatatacatctgcaaataatttcggtttacagaccaacttgtcaggtgaccaagctgcatgttttgctgccatcttgtacgaacgtcagattgaattggcttatgaaggaaaacgttttgatgacttacgccgttggatgttgtttgatggtggtgcagaaagagcagaaggtgctcctgacacatgggttccgtctggttggaatggaaacacttgcacttatttaggttttaaacaactcaatggacaacgccgtgataatcttgaattccgtgttagtagtactcatgagagtaaagggcttggtggtacttcgtgggaaataaatggagtaaatccagatcctctaaaagatgtaacacgtccggatgcattagatttgagacaagcggatatttccagtcaacagaataagttagttgagttttataatacttatttgacgcgtaaaatgaagaaaggtgatgcatatactactgatcatacacctaaatatatgaattttcttcctagatattacttcctaggttttgcggaaggagctcaaaaggctaatcagacattgccacagactattggttgggcagattataataatggtggtgctaacggtactttcgatccattagcagaataaatttataatatctgatttatcttgataacgtctctaatatctcttgaatgagaggattggagacgttatttttttgataggaatatgggttctgagggaaaaaacatatttaggataataaattctgttctactgattacaaatcttttcttctttcgtcttattattgtatttttgaattaacaacttcacaaaaccaaataaaaatgaagaagaaacaggtacttttagcagtttttgctgcaacaatgttgactccgaccgttgcatgggcgcaatacccacaaatatctggcgaagccaaagaaaactatacaaaaatgatgactgaagagcggaaacgctctgatgaagcatgggcaaaagcgttgccgatagtacaaaaagaagctagagaaggacgtccatatattccttgggctggtcgtccgtacgatttgccacaggctgatatcccttcattcccaggtgctgaaggtggtggtatgtacagtttcggtggtcgtggaggtaaagtgataactgtcacaaatctgaatgatcgtggaccgggttctttccgtgaagcatgtgaaactggtggtgcacgtattatcgtttttaatgttgctggtatcatccgtctggaatctccgattatcgtccgtgctccttacgtaaccattgccggacaaacagctccgggagacggtgtttgtattgctggagaatcattttgggtagatacacatgatgtggttgtacgtcatatgcgtttccgtcgtggagaaacgaaagtatggcatcgtgatgactctttcggaggtaaccctgttggtaatataatgatcgaccactgttcctgtacatggggattggatgaaaacatttctttctatcgccacatgtacgacccgagtgaaggacagtatgaaagcaaagatttgaaacttcctactgtaaacgtaactattcaaaacacgatctctgcaaaagcgttggatacatacaatcatgcgttcggtagtacgttaggtggtgagaactgtgcatttgcccgtaacctctgggctagtaactccggacgtaatccttctatcggttggaatggcatattcaatttcgttaataatgtagtattcaattgggtgcaccgttcttccgatggtggtgattataccgcgatgttcaatatgattaacaactactataaaccgggacctgctactcctaaggattccaatgtaggacatcgtatcttgaaaccggaagcaggacgtagtaagctggatcataaagaatatggacgagtatatgccgatggaaatataatggaaggctatcctgaaataactaaagacaactggaatggcggtattcagattgaaactcaaccgaacactgacggatatactgaatacatgcgtagctatcagccgtttgagatgccgtatatcaatatcatgggggctaaagatgcttatgattatgtattgaaacatgtaggcgcgaatattccttgtcgtgatattgttgacgaacgtgtgattgaagaagtaagaacaggtattccttattatgaaaagaaacttcctaaagatgcttatggtgacttaacaggtttgtctcctaagtcaatgggagaagatggacagttcaagtatcgtcgtttaccgaaagattcttataagcagggtattattactgatattcgccagatgggtggttatcctgaatacaaaggtactccttatgttgatacagacaaagatggtatgccggacgaatgggaaattgctaacggactaaatccgaatgatccgagtgatgccaataaggactgtactggtgacggatatactaatattgaaaaatacatcaacggtatcagtacaaagcataaagtagattggagagatatgaagaacaactacgatacattggctgaaaaaggaaaattaatgtaattatgaaaaagatactgatactatcattgctttttatttccggttggatgtctgcacaggcagtcgacttaaataaagagaatcgtgatcctgaatatgtaaagtctattgtcagccggtcacaaaagatcgttgataaactcggacttacagatgcgaaaatagccgaagatgttcgcaatgtcatagccaatcgttacttcgaattaaatgatatttatgaggtgcgggatgcgaaagtcaagaaagtaaaagaatccgggttgactggtgaggctaaaaatgaagctttgaaagctgcggaaaatgaaaaagatgcggcactatatcgttcacatttcgcttttcctgccaatttatctctctttcttgatgaaaagcaaatagaagctgttaaagatggcatgacttatggagtagtaaaagtgacttatgactcacatctggacatgattcctactttgaaagaagaagaaaaagctcaaatctatgcttggttgatagaggcccgtgaatttgcgttggatgcagaaaattcgaataagaaacacgctgctttcggaaaatacaaaggacgtatcaacaactatctggctaaacgtggatatgacctgaagaaagaacgagaggaatggtataaacgtataaaagcccgtggaggttctatataattaaaaaataagatactataaaaagaagtgaaattctttcccattgtaaatggttagtttgtttgatggtggaaagggtggctcggagagtcgcccttttatcgtatataaattttgaatctattgattcttctagtatatttgagtacaaatggcgctttctatcgtctcctctgtataaaagatacaaatatagaatatagaaatgaaaaagttaagaaatacattagccgcaataagtcttctgtttctggcttcttgtggggggaacaaagactactacatgttcacttcgtttcatgaaccggctgatgaggggttgagatacttatatagtgaggacggaatgcattgggacagtattccgggagtttggctaaagccggaactgggacagcaccagctcatgcgggatccctcgatggtacgtactccggatggaacctaccatttggtctggactacaagttggaaaggtgatttaggatttggctacgcacattccaaagatctgatccattggtcggaacaacagatgattcctgtaatggcagacgaaccgactactattaatgtatgggctccggaaattttctatgacgacgagaacgatcagttcatggtcgtatgggcttcctgtgtccccgggcgtttcgaaaaggggatagaagaagagaataataatcatcgtttatactatatcactacaaaagattttaaaaccgtttcgaaagcaaaacttttgtatgatccaggattcagcaccattgatgccgttatcgtgaaacgggcaaagaatgactatgtaatggtactcaaggataacacccgtccggaacgtaatctgaaaatcgctttttccgattctatgaccggtccttattcgcccgcatcccagcctttcacagaatcctttgtagaaggaccgtctgtagagaaagtgggagacgattatctaatctattttgatgtatataagaaaaaaatttatggcgctatgcgtacgaaggatttccggaactttacagatgtaacagaagagataagcatccctgtggggcataagcatggaaccatatttacggctccggaatcagtcgtaaaagcattattggaagaaaagaaataaatccggaaacaattttaaatcagaataaatcatgaacaactctgctaaaattctttttgtactggctgtcggttggttgactactacagcctttgcacaagatagaattcattatacaggaaaagaattatcgaaccctgcttgtcacgacggacaactgtctccggtagtcggagtacataacattcagttggtgcgtgcgaatcgtgaacatcccgatgcttcgaacggtaatggatggacgtataatcatcagccgatgctggcttattggaatggacaatttttctatcagtatctggcagacccttctgacgaacacgtaccgccttcacagacttttctgatgacgtcgaaagatggatatcgctggacaaatccggaaatagtgtttcctccttatcaagttcccgatggatacaccaaagagtctcgtccgggtgtgcaggccaaagatctgattgccattatgcaccagcgtgtcggattctatgtttctaaatccggcaagctgattacaatgggaaattacggagttgctttggataaaaaggatgatcccaatgatggaaacggtattggccgggtggttcgtgaaataaagaaagacggttcttacggaccgatctatttcatttattataatcatggatttaatgaaaagaacactgattatccgtattttaagaaaagcaaggatcgtgagtttgtgaaggcttgccaggaaattctcgacaatccgctgtatatgatgcagtgggtggaagaagccgaccgtgaagatcctattctcccgctgaagaaaggatacaaagcattcaattgttatacattgccggatggacgtattgccagtctttggaaacatgcgcttacctctatcagtgaggatggcggacatacctgggcagagcctgtgcttcgtgcaaaaggtttcgtcaatagcaacgcgaaaatttggggacagcgtttaagtgatggtacatacgctaccgtatataatccgtcggaatttcgttggccgctggctatatctttgagtaaagatggattggaatatacgacattgaatttggtacatggcgaaatcactcccatgcgttatggaggaaattataaatcatacggtcctcaatatccgcgtggtattcaggaaggcaatggagtgcctgctgatggtgatttgtgggtttcttacagtgtgaacaaggaagatatgtggatttcccgtattcctgtcccggtggaaataaatgcttcagcacatgcggatgatgatttctcaaaaaataaatcaattgcggaactgactgactggaatatttattctccggtttgggctcctgtttctttggaggatcaatggttgaagttgcaggataaagatccgtttgattatgccaaagtggaacgtaaaattccggcttctaaagaattgaaagtatcatttgatttgaaagccggccagaataataaaggcacactccagattgaatttctggatgagaatggaatagcctgttctcgtatggaacttactgatgatggcattttccgattgaaaggcggctcccggtttgcaaatatgatgaaatatgaagcaggaaaggtttatcatgtagaagcagtcctttctactgttgatcgtaatattcaagtatatgtagatggtaagagagtagggttgcgtatgttctatgcgcccgtggctgctgtggagcgaatcgtattccgtactggcgtacctcgtacattcccgactgtagatactcctgccgaccagacttatgatttgccgaatgcaggtgcacaagatccattggctgaatatggcattgccaatgtgaaaacatcttctacggataaagatgcatcttctgcttttttaaagtatgctgatttcagtcattatgcagactatttcaacggtatggaagacgaaaatattgttcaggcaattcccaatgcaaaggcttcgggatggatggaggaaaatattcctttgttcgagtgtccgcaacataactttgaagaaatgtattattatcgttggtggtcaatccgtaagcatatcaaggagactcctgttggctatggcatgaccgagttcctcgttcagcgttcttattcagataaatataatttgattgcttgtgcaattggacatcacatttatgaaagccgttggttgcatgatccgaaatatttggatcagattattcatacatggtatcgtggcaatgatggcggtccgatgaagaaaatggataagttcagctcatggaatgcagatgctgttttggctcgttacatggtagatggtgataaggactatctgctggatatgaagatagatctggaaaccgaatatcagcgttgggaacgtacgaaccgtttgaagaacggattgtattggcagggtgacgtacaggatggtatggaagaatcaatcagtggcggacggaagaagaaatatgcccggccgacaatcaatagctatatgtatggcaatgctaaagcactttcatgtataggaattctttccggtgatgaggggatggctatgaaatatggcatgaaagcagatactttgaaaaatctggtagaaaatgaattgtggaatacacgtcatcagttttttgaaacgatgcgtacggactcttctgcaaatgtgcgtgaagcaatcggatatattccctggtatttcaacctgccagataccacccaaaagtatgaaattgcctggaaagaaattatggatgaaaaaggcttttctgctccttatggactgacaacagcagaacgtcgtcatccggaattccgtacacgtggagtaggcaaatgtgagtgggacggtgctatctggccgtttgcttccgcacagacattgacagcaatggctaactttatgaataattatccgcagactgtattgtctgacagtgtatatttccgtcagatggaattgtatgtggaatcacagtatcatcgtggtcgtccctatattggtgaatatttagatgaggtgaccggttattggctgaaaggagatcaggaacgtagccgttattataaccattccactttcaacgacttgataattacaggactgatcggacttcgtccacgtttggataatacgattgaagtgaaccccttaattcctgccgacaaatgggattggttctgtttggataatgtattatatcacggtcataatctgacgattctttgggataagaatggtgatcgttatcattgcggaaaaggattacgcatttttgtagatggtaaggaggtaggacatacagatacattgactagaattgtttgtgaaaatgtactcaaataatctttatttttagacataagaacaaaagaacataaatgctgcgctttgaaattatttctattgcttattgaactgctattttattttttgttcttatgttcttctgtctgaattagattcccatttatcgaacaaataaaagatacttgaaaaatgaaattcaaaaagattcttctttcattgctaatttgtttgtcttgttttgtacaggcgaagaatataaccatcagtcgtcttacctgtgagatgcaggagggactggtagtggtcgaaggttcaccccgtttgggctgggtgatggaatcgccggaaaatgggacacgacaatctgcctatgagattgacattcgggaggcttttacaggacgttccgtttggaatagtgggaaggtttattcttcgcagagccagttagtttctacaaagggggcagatatacgtcctgataactcatttaattatagttggcgcgttcgtgtttgggatgaaacagatacgccttccgagtggagcagtgaagcgaaattccgggcagtacccgaaaggttatcttcggggcaatggattggagctattacccgacaaaatgctcatttaccggaagggcgtaagttccacggtggagagctgaagaagccggaagtgaaagcagcttgggaagcagtggacactttggcaaagaaaagtatttgtttgagaagaacattccaggtaggagatgcgacagaagggggtacaaaccgtaaaccgggcaagaaaatagtggaagcaacggcatacgtttgtgggctgggattttatgaattttctttgaatggcaaaaaagtaggtaacagtgagtttgctccattgtggagtgattatgataaaactgtttactataacacatacgatgtaacggaacaattgcggcgtggtgagaatgtcgtaggaatcttattggggaatggattctataatgtgcagggggggcgttatcgcaaattacagatcagctttggtcctcccacacttttatttgagctggttattaactacgaagatggaacatgtacgacagttcattcagataatgactggaaatatgattttagtccggtaaccttcaattgcatatatggaggggaagattatgatgcgcgtcgtgaacagaaaggatggaatcagattggctttgatgacagtcactggcgtccggtagtcatacaggaagctcctaaaggaatacttcgtccacagatggcggctccggtgaaaatcatggaacggtatgatattcaaaaggtaactaaactaaatgcagagcaagttgcatcagcctctgtatcaacaaagagaacagtcgatccttctgcttttgtgttggatatgggacagaatttggctggctttccggaaataacagtacgtggcaaacgtggtcagaaagtaactctgattgtagccgaagcattgacagaggaaggtgcttgcaatcagcgtcagacagggcgtcaacactattacgaatacattctgaaaggggaaggagatgaaacatggcaccctcgtttctcttattacggttttagatatatccaggtagagggtgctgtcttaaaaggacaaaagaatccgcagaaattgcctgtattaaagaatattcaatcctgtttcgtatataattcagccaggaaagtttccactttcgaatcatccaaccggatatttaatgctgcccatcgattgatcgagaaagcggttcgcagcaatatgcagtctgtgtttacggattgtccgcatcgtgagaaacttgggtggctggaacaggtacatctgaatggtccgggtttgttgtataactatgatttgacagcatacgctccgcagattatgcagaatatggtagatgcacaacattccaacggagccatgccgacaactgctccggaatacgtgatttttgaaggtccgggtatggatgcttttgccgaatctccggagtggggtggttctttggttattttcccttttatgtactatgagacttatggagacgattcattgattaagaaatattatccgaatatgcgtcgttacgtggattatctcaagactcgtgcagataaaggtattctgtctttcggattgggagactggtatgattacggagattttcgtgcgggattctcacggaatacacccgttcctttggtggctactgcgcattattacatgacagtcatgtatttggtacaagccgcgaaaatggtgggtaatgactttgacactcgttattatacttcgttggcacaggatataatggctgcatttaataaatattttcttcataaagatactgcacaatatggtacaggaagccaatgcagtaatgcgcttccgttgttcctccaaatgacgcaggatgtagatgaacaaggtaactaccgaccggatgcagatttgtatgagaaagtattcacgaatctgataaaagatgtggaagcacatggcaaccgtttgactaccggtgatgtgggcaaccgttatctgattcagacattggcgcgtaatggagaacatgaacttatttataaaatgttcaatcatgaagaagctcccggatatggtttcctgttaaaattcggcgctacaactttgaccgagcagtgggacccccgtcaaggttcttcctggaatcactttatgatgggacagattgatgaatggttctttaattcactggtcggtattcgtccttctaccactccaaaacaaggttatcagaagttcatcatcgctccccaacctgtgggagatttgaaatatgtcaaagcgtcgtatgatactttatacggtaccattaatgtggactggacttgtgagaatgggactttcactttaaacgtgtctgttccggtgaatactaccgctgtcgtttacctcccgggcgaaaaagaaccgaaagagatacagagcggaacatatcaattggtttgtgcaaaatgaaagagacattttatatatatttgtagaatgaaaaacaatgtattcgtataaaaaatcatgcagcatctttattttaatcatgtagcatgtttgaaaaaaacatctcaatgattgtcttcaaacattgggaagaaaaaaagattctattagcatgattttttagaaggtaacaatgaaattatactttaataatatcgattatgaatttacgaacaactcttatcgtctttctttgcttctgtgcaaccacagttcttcgtgccgagcgtgtagatatgctgaaggccggtgcaaaagcaaatggcaagactcttaatacaaaactaatcaattcaacgattgaccgtctgaaccgtgggggcggaggtactcttttctttcctgccgggacttatctgacggggagtatccatctgaaaagtaatattacactggagttggaagccggagctaccttgctcttttctgacaactttgatgactatcttccttttgtcgaggttcgccacgaaggagtgatgatgaaaagtttccagcctttgatttatgcggtagatgccgagaatattacgatcaaaggagaaggaactttagacggacaaggaaagaaatggtggatggagttctttcgtgtcatgattgatttgaaagacaatggcatgcgtgatgtgaataaatatcagcccctatgggatgcggcaaacgatacgacagcgatttatgctgaaacgaacaaggattatgtaaatacattgcaacgtcgctttttccgtcctccgttcattcagcccgttcgttgtaagaaagtaaagattgaaggagtgaaaatcataaattctcccttctggacggtcaatccggagttttgtgacaatgtaaccataaaggggatcaccatagataatgcaccctcaccaaatacggacggagtgaatccggaatcctgccgcaacgtacatatcagcgactgccatatatcagtaggagacgattgcatcacaatcaagtcgggaagagatgcgcaggcccgtcgtttgggagtaccttgcgagaatatcactatcaccaactgcaccatgctttccggtcatggaggcgttgttatcggcagcgagatgagtgggagtgtgcgtaaagttactatttccaattgcgtgtttgacggaacagatcgtggaatccgtattaagtcgacccgtggaaggggaggagtcgttgaagatattcgtgtcagcaacgtcgtaatgagcaacattaaacaggaagctgttgtattgaatttgaaatacagtaaaatgcctgccgaacctaagagtgaacgcactccgatattccgtaacgtacatatcagtggaatgactgtgacaaacgtaaagactccgatcaaaatagtgggcttggaagaagcgccgatatctgacatcgttttgcgtgatattcatattcagggagggaaacagaaatgtatcttcgaaaattgtgaacgtatcacgatggatgacgtaatcgtcaatggtgaaaaaacaactagcataaattaaaaataaatgaaacgaatcctttttactatgcttcttgccgcatctctttcggccgaagcccagacgcaaacatacgagacagaatttgcccgtcccttgaatgaagtactgacggatatacagaaccgtttcggagtccgtttgaaatatgacattgatacggtgggaaaagtgctgccttatgccgatttccgtattcgtccttattccgtggaagagtccttgacgaatgtattggcacctttcgattataaatttgtcaagcagaaaggaaatatgtataagctgaaagcatacgagtatccacgtcgtacagatgcagatggagagaagatgttggcttatctgaatacactctatacagaccgacagtcttttcaacttcgtgccgattctctgaaaaaagaggtacgtcagcgtttaggtatcgatactttgctggctcaatgtgtcaaatccaaacctattctttcaaagatacgtaagtttgatggctataccgtgcagaatttcgcgcttgaaacacttcccggattatacatttgcggttctatctatacgccccaatcgaaagggaaacatgcgttgataatctgccctaacggacattttggtggcggacgttatcgggaagaccaacaacaacgtatgggaactttggcacgtatgggagctgtttgtgtagactatgatttgtttggatggggagagtcggctttgcaagttggcagtgcggcacaccgtagcagtgcggcgcacactatacaggcaatgaacggcttactgattcttgactacatgcttgcttcccgtaaggacattgataccagccgtattggtacgaatggcggttcgggtggaggtacccatactgtattattgagcgtattggatgatcgtttcaccgcttcagctccggtagtgagcctggcttctcacttcgacggtggctgtccctgcgaaagcggaatgtccattcaactatctgcaggaggaacctgcaatgcggaattagccgctacttttgctcctcgtccacaactgatcgtatcggatggcggcgactggacggccagtgttcctactcttgaatttccttatctgcaacgaatctacggattctaccaagcaaaagataaagtaacgaatgtacatcttcccaaagagaaacatgactttggtccgaataagcggaatgctgtttatgacttcttcgcagaagtattcaaattggataaaaagatgttggatgaaagcaaggtcaccactgaaccggaatccgctatgtatagttttggtgaaaaaggagctttgcttcctgaaggcgccatccgttcttttgacaaggtagctgcttattttgacaagaaggcttatgctaacttaaaatcagatgcttctctcgaaaagaaagccatcgactgggtagcttctttagagttgaacgatgataaaaaggcaggttttgcagtaactgccatttataatcatcttcgtaaagtacgtgactggcacaatgagcacccttatacgacaatccccgggggtatcaatcctctgacaggcaaaccgctttccaagctcgaccgtgaaatgattgcagattccgctatgccgaaagaagtgcatgaaaggctaatgaaagatttacgcagagtattgacggaagaacagattgaacaaatcctggataaatacacggtaggtaaggttgcttttaccttaaaaggttatcaggccattgtacccaatatgacggaggaggaaacggctttcgttctggaacagttgaaactggctcgcgaacaggctattgactacaagaatatgaagcagatttctgctatcttcgaaatttataaaaccaaatgtgagcagtatttcaatgagcatggtcgcaactggcgtcagatgttcaaagattatgtgaataagcgaaacgcagaaaagaaggctcaaggaaagaaataaaatgaaggtaaacccttaaccttctacatagccggaatatctccggggtaatagaagaatataatagagctatgctttgcaactgacaaagcatagctttatcatatctaaagctatgctttagttcccctaaaacactgctatcacttatttcttcacgattactaaacatctttttcgcagaaaatgtgttattttgtagatggctaacagaaatgtatatgatatggataagcaaaaagtagcattagtcctttccatggggggagcacgtggaatagcacatataggagtaattgaagaattactttgtcacaactttgagattacttccattgcaggaagttccatgggagcaatggtgggagcaatgtatgcttcaggaaaaatggaagaatgtaaagaatggctgtatagttgggacaaacgcaaaatgtgggaattggcggatcttaccttaagccgggatggattagtgaaaggtgaccgttttattaaagaactgaaacaaattattccggacatgaatatcgaagacctgcctgtcccttatgtagcgatggctacggatattgtccgcgatcaggaagtcaggtttgacagagggagcttacatgaagctattcgtgcgtctatttctatccctatgcttttccgtccgttgagaaaagacggtatggtattgattgatggaggtattctgaatcctcttccattgagtcatgtgcaacgcactgaaggagacattctgatagctgtcgatgtgaatgcacccattgatactggaaagaaaaagaaagtatctccttataatctgttgacagaatcttctaggatgatgatgcagcaaatcacccgttatcagatagaacgttgtcagccggatatcttaattcagatttctggcgatacgtatgatatgttggagttccatcatgcagcttcgattgtaaagacaggagtggaagttactcgaagaatattaatgcaataaatagtggatactatcgtatttgttatcgtgcccaaaagactttaacaaatacgatagtattcattaaagtgatagatttttattcaatataaatcatctttttcgtcattcccccatcaatcgtgatgttttctccattgatgaaatcattgttttcctcgcagagaaacagacacatacgggcaatatcttccggtttgcctacccgtcgcgaaggatgttgtgaatgatcttccggccggagttggtcataatcatgagtttgtatccatcccggagcaatagagttgacggtgatattccattcagataacgataaagccagtgcatgagttaaagaatagataccgcctttcgaagctgcgtaaccttcacttcccgattcactcatcaggtaacgtgtggagcagatattgataatccggccgtataggttaggagaggactgctctttacgatgtatggcaagcaggcgggaggtgataaatacagggcgtaggttgatagaaagaattttgtcgaaatcctctacgctcgtttcggtgatagacgaaaattgactaataccgacgttgttgataataatatcaatatcattccattcggaaagaatacgttgcatgcaactttcaagcgcatccttatcgctgacatcgactttatggaatatagatccggttgcttttgcagtctcttgtcccgctatttcatttatatcacaaaaagcgacttgatcgccggacaggcaaaaaacttctactattgccttgcctataccttccgctcctcctgttataaatactcttcttttggagggggatgattttgaggtcattggagtacacgaagccgattctgccggatgaactgttgtagatttcttcttgccatatttctgtgcttgtttccaagcagcctttctggcctcatattgttcctgttgtctttctatataattatctgccatcgttcttttttatttattggcaaatgtaaaatataaaatggataaatacaaagaatcgaccgctcttttgcggacaaaggagcggtcgattttatttagaagacgattcaatttaaaacttcgtcggatctatctctgcatatttaattcgttgacggcgccaagtgtaaatggcatgcagtttcccgtctttcccttgaataatgctagggtaagagtattggctaatcggactatcttctaatgtaagaacaggctgccaattgataccatcttctgaaacggccacacagagcggagtacgcggacctttcggagttccgggcaatgtagagaaattattgtagataagtatatgtctaccgtctttcattgtcacagcatccgttccggaattattattcggaacatccagtagcgttactttactccacgtatcaccattatcgctgctccacgcagttgctacctgtgcgttacgtgtgcggcagagtatctgtaatcttccatccttatgcttcaaaatactgggttgtattgcataaacaggtttggctccttctcctttgatagcttctccgccttcctggtcatccacattcatatccccctttttgcggttttgggtggggacggataactcggcatccagtggtccgaccatcttccaggtcttgcctttatcatcggaaatctcgaaatgaactctccatccgttacttccttccgtactggaagggcagatgatacgcccattgatatattccggcttattcttaataggtccaagaaaaccttctggaagcggttcgcgtttgctccaggtctttcctccatcgcgtgaacgaactaaccatcctgtccagtcactcactttcagacctattttatagaataaaatcaagtcacctccgggaatctggaaaagaaccggattccaacaagcttttctgcgggcaataagttttcctttttcatttttcacaggtgtacaagttgaatcgattccagccaatgcagcttgtgaatctttgagcgagaacacaccgtcagcggcaagttggggggcggtccattcttttgagtctttaggcttacgacatacccaaatgcaacaatccggattgcgctctttggttcctccgaagaaagaggctacgagatcgccgttcttcagttctacaatcgtagctccgtgacattcggggaaagaagcttttttgtataggaattcatcacttagaatagctgtattccgggtgggtatgtctacactgaagtgatattttcccgatccgatcttttccttccgtccatccggtaggtgcacttcacctgttgtgttggcaggaagctcgatgtcccattccagatgagtaggagtctttgtccaccggctgattattttcccgtagatactcatgtatgaggcatccacattgctcaattcctggatttcaaaagccggttggaaaacgatatgtttgtaaccggacttccagcggtctgcacgaatacctgccaaattattgaaacaccagggtaataaatcgcctaaaagcatcacgtgattaccgctgttcatttcaggattggccgtatcaccgttccataactcccaaatagtggtagcacctttttcaaccatatatccccaagatggatatgttttattggtagccaacaggtaggctacatcggcatggccacgacggctcaattcgcgcaatagccattgcacaccgattactccggtacttatatgtcccttgttggtggtgataatagaagtgacggcatttttagctacctcatggatgtagttcttaggtaccagtccaaaagcaagtggcaggatattggcagtaactgtgttgttgccatagaaaatgctgtcgggatataaagtatgtcccggtacgggagaagtaccttcttttatgtgcagaaaacgggcattgaatgcatctttcatacgatgttccaaatcttcccattcttctgcgtcagctttcagcccttgcaggcttgcaaagcggtgcatcagttgtaataccttcagataataagcggtggcgatcaaggcaccgtcggtcttgcgggaggggtccttactatgaattaactccagtgattcgggtggaacacaccagtcaccatatttatctttggtgatgataaaatcctctgtcatgtagtattcacggatatgagatacccacttcttgatagccggataattctcttcgatcgaacgtttatctccaaagttcgtgaaaagcatatcgcaggccatcggtaaggcggcaggccaagtcacattgtccgagtagtagttccagtatgccggggctacatcaggaatacaaccgtcttcccgttgcgcttcgcgaatgtcacgcgcccatttggtatacatggcgtaattatcgaaaagcatactttctccccaacaacccatggtacggtcacccaaccagggttggcgttcattccgttgcggacagtcaaccggcatccctttatagttgctccggattccccaaaatgcattacggacaatcttattcagagtttcatcggaacagttgaaagtaccggtatgttccatttcatcttctactacttcggcaacgaaatcttctgctttggcgtccggataaccgctgacttctacataacggaatccatgataaataaagcgaggcgcccaggtagcatcttttgtttcgcgtccgttggcaacatatacatctgtagaacgggcatccctgaagtttcttgtataaagttcaccattatcttgcaggctttctgcaaaacggagacggatgctgtcaccggcttgcccttttatccggaaacgtacccatcccgccatattctgaccgatatccagaatatatttgctaccgagctttttaatagaaacgggtttcaaggtttctgtgactttcatgcccggcatcatttgtgcacgcaatgttcccgaaggaatactgacgcgttgggcctgcatccagcccttgtcatcatatccggtttgagtccagtctcctaactctttacgggcatcgtattcttcgccgtcatattcattgttgctacggataggaccttcagtagttaatttccatgaagtgtttgtagcaattgtttctttgctgccgtctgcatattcaacaatcagattcaaccgaagcttaggataaccgaaagtcggtatcttatacggtttatagttctgacgcatcgtatagaagcggccatttccgagagttactcccatagcattttctgcctgaagcagtgaagtcacatcgtatgtgttgtacagaatcgttttccggtagtcggtaggagcaggtgccagtacttgattgccgatgcgttgcccgttgataaacagctcatataatcccattccggcgatatgtactgtggcacgtttcacgcctttctttaacgcaaactcttttcgaagataacgggctgccaaacggctcaattgtgtttcgctttctccgggagcggcccgatccaggccgatccattgtccttgccagtccgcttcattaaatagtcctgtggtccagaaagccggagcactccaattcgttgcacctttgttggtgtcgattttcactttccaatagtaggaagcattacgttttaatgtttttccctgataagtgatccattgggaagcgtcagattcaatctttcctgaatcccatatatctccttttccttgttccaatagctccggggaagatgcgacaagaatgtgatacgcagtctgtatcacattctgttcatccgattcgatgcgccaactcaatcggggctggcgcacgtcgataccttccggacttttcagcagttccgttcgcagatcagtgatatctatggctgcgtatatggccccggtaaagagcagaagaaagaagaatgatactatccttttattcataagtatgttttcatcattcgtttatataagattatttattccatttttgttgtgcgtccggtaactctgtccagtctttccctatatagttcttactactgtccactacaatcaggatatggtcgttcccgctgcaataaccgctatcgtgctggaatttatgcacaccattatcaaattctccgatgtattccaatttaccatctttcgtagtgtaccaccaggcattctttttcgcaccgctaatcttgctgaaatcaacttccatcggacgtccggtatagttgtataccatcagataatcattaccacgtgtagcgatagcgcggtcgtaacgttctccattctgtcctgcaatgatagactgatcgggtatgcgttcgaagaacgggaaagtcagcatcaggtttttcagatacttcatctgattgtagcccggatcattcaaagcatcataccagggcttttttgcaccgtaagcaccacctacacccggtttgataaattgcatgattgagttatgaccgtaagtatgtccgaaagctccggcaaatacagaccagtaagcataacggcgtacgtcataatccttccacaacagttcattctcatcgtgcaggccatgaggaatttcttcgtagatcggttcgccgtcaatcacaggtttcatgggttccatggttatgctgcgttctacaaaacgccagttatcttcttccgtattttcttcgataggatagtcaccatctccgaaacgttgtccgtagcggcggtgtccgctttggaacatgttgaaatccaaccagggagcattattgaaccaagttgcggaggttgtccttccgcgtggatggaatgtcatcaggtgatttttgtcgatagccttgatagaggttgctaatgcttcccattcggctgttttcacgtctccgcgaatatccccaccgataaaccagataatattgggttcgtccttataacgctccgctaaaaacttgccgtatgcttttgcctgttctacagtcatttcgccccgatttaccgggcttccccaaatacagaccatgccgatatattgtcccttctttgctgctgtacggatgatgtaatccatgtgatcccaataaccgtatacacctttttgattgatgtttttgaagttatatccgtcaatcatcgaatattgtccgtagatattcatagacggaacattgttcaacgtttgaacctgaatcacgttatatccgcgacgtttacattgttccaggtaatattcggcttcatcccggttcaagcgttcgggcaatagccaaccggtttctcccaaccaaaagaaaggagtgccgttttcgtgtttcagataacgtccctcttcggaaactacgagcttgccattgttccaggggatatacgtcttttgtgttttcttctgtgctgcgaccgaagttgccattgtcaatagcagcaacaaaagaggaagaattttgaattttctcattgtactttatcgtttttagtttatttctttgtcattttctcatactcaatggcagccagaataaatgaacctaccgatttcggatcattttctatgatcggttcactgatataatattcaaatgagccgtcgcggtatctttttgaatctccacccaatcctgcaacagcacagcaattggtgattgtataactgccatcttcttccaaacgggtaaatgtctttaccattccgtcaaaggctttttgtgtcggttcgatatattcgttgtcaatatatcctttattaatagctttggcaagcgtatagataaacagggcagtggcagatgattccaaataattaccttcacgcgctccctgatcggttacctgataccaggttccggatgaaggatcctgatatttcacaatcgctttagccaatccctgcagaatctgtataatgctgtcgcgtccggcagtttcctgtggcaggaagtccagtacatccacaatagctgctccataccatccgatgctgcgactccaaaaattaggagagcaacccgtttcaggattggaccatttctgttcgtgactttcatcccatccgtgataataaagccctgttgcgggatcataagtcttgctctttatcaaaagaatttgtttcgttgcttcgtcaaataaagcaggttcatcaaaagtagcaccatattgaaccagataaggagaagccataaaaattccgtccaaccacatttgatgaggatatctcaatttatgccaaaatcctccctcactggtacggggttgctccgccatttgcttgcgtaaagtatccatagctattttgtagcgttcgtctccggtctgtgcataaagatcgaaaaggatctttccgccgttgacattatcaatattgaatgaaagatacttcatggttttgatatgcccgtcagcatctatcaggctatccgcataaatcttggcatactcataatatgtactgtccccggtatgtttccattcttccaacatggatttcactactaatccgtgggtatatccccaacgtggttttttagctttttcaatcatccagggttcggggaaacgtttcatttcggagcgtgccatgcgttcactccatttttcagtctctgctttctgaggtgccgtacatgcgataaaacaagtagctccgcaagcaacaatcagttttaataagtttctgttcatatcggttgagttattattttccggtcaatatatattcctgtcctgctttggtgggcaggtcatataaataggtatctgcaacaaccactttattcaggttggctttttcgttgattaatggttcgggaatggcaggaacagcgtagagaggatttgtgtttgcccctttggcacgtttcagccctttgcctgtcaacgggttaagcgagcgcaggcggcagttgccacctttatgggattttatgaccaggcggcttactttcccgtttttccaactcaaatcaagttcgaaacctccacgggcaatgattcctttgatagaaccttctttccaaacggcaggcaatgcaggaagtaaatatataaaaccgtcgtaactttgcatcaacatctctgcaatacctgcggcacaaccaaagttcccatcaatttgaaatggcggatgcgcatcgaacagattagggtaggtgcctccttttttcttttcattgcgtacgagagtcagctggtcagttatcagcttgtaggcgtggtcgccatcaagcaggcgtgcccagagacagactttccatcccatgctccacccggtcgacgggtcgccacggtgaatcagagaggtacgtgctgcatcgaatagttcaggagtacggtaaggggaaatctgattgctggggaagagtccgtacaaatgagaaatgtggcggtgcacgtccttcggatcatcccagtcgaacatccactcttgtaattgcccccaatgtcccacctgcatgggagccatttctttgagacgttgtgtcagatgagaggcaaactcctgatctgtatctagtatttgagaagcagatataattgctgtccaaagatcgaaaatcaattggttgtccatggtgcatccggcagctgtggtagcttttccattgcttcccgaatgtacattctccggtgaattactggggcagactaccagccagttgtgcacgggttctttcaccataatttcatcaaagaaacgtccggactctttcagtatcggataaacggaacgcagaaattccacatccccggtgtataggtaacgctcccaaagatgtcggcaaagccatgcgccaccactgggccacatacccgaaggagctttgtcaactgctcctgtaatacgccatatatctgtgttatgatgcaacacccatccgttggctccatacataatcttggccgtctcttttcctgtgtcactcacttcttttatcagacggaataacggttcattcagttcacttagattcgttacttccgaaggccagtaattcatttccaaattgatattacaagtatatttactatcccaggaaggaactaatttatcattccaaattccttgtaaattggcgggttgtcctcccggttgggaagaacagatcaacagataacgtccgaattgaaaataagtagcaaccagatgtgcgtcattggtgtttttgaaattctccacacgcttatcggttgtcacatttgcatattggtcttctcctaaatcaagagaaacacgtgtcagatattgtcggtagaaatcaacgtgattccgcttcgattcaatgaacggatgaaccattgcctttgccaaatagttttttgcccgttctatctgattaccggtgatgtcttgatagttattgaaattagttgcaatagatacatagatgatcgcttcgtcggctttctctacagaaagtattccatcggcgcaagctatttctccacctttatttttagcagtcaatctgccttgaaattctacttttcctttcaatccttcatgcaaggaagagactcccgagagtgttacacagtttccctcttcagaagcgatcataacatcctggtgaggggaggtaagctgtgcattgaaagtaatttggccggggcgattggcagtcagtcgtaccattactacctgatcggtaaatgaagtaatcgtttcgcgttgatactgcactccgtctacttcataacgtacgattgcacgtgcggaatccagacttaattcccggtaatagttagaataacgtgtatgtccgggaaaagcgattcgtaaatctccgaaactttgatatggcattcctgaattcgtctttgccatcaccttttctgtagcgagagtttgtgcttccagatattttccggcaaaaacaagttcacgcactttgggaatatactccagtgcattcggattagcgttattattgggacgtcccgcccaaatggtttcttcgtttagttgtatttgttctgtgcccggtgttccatataccatggcccccaaacgaccatttccaaggggtaatgcctcggtccatacctgcgcgggacagtcataccatagcttgtattcgggtacagataactttttctcctgtgcatgaatacaacctacagatactattaccaacagatatccgattaatctctttttattcatttctttctattgcttttattcttatataaacctgttgtttacatacttttataaaagagacgattgaaagttctttttgtacccattgcacaagcaataagaaataggaataattaaaagttatcgggtataaaaaaaaacgaacttcaatatccggctaaaaagaacttactttgcatctgtaaaaatactcctgaaaagtataatttcagatatagacttatgtatttactattaaacaagtatatgaatatgtataatttaatcattaggccgttattattttgcattgatccggaaaaagtgcaccggatgcttttaagctggttgaagttttatcgctatttgtttccggtccgagcttgcgtgagaggctacagcagagtttctgatccattttcgtatgggcatttgcaatttaagaaccgaattggactgtctgccgggtttgataagaatgcagaggcttttgatgagttggcagactttggtttcggctttctggaagtaggtacagtaactcctgacagccaatcaggaaatccttccccacgtatttttagattggtggatgatgaatcgttgatttcacgtacgggcttcaataattgtggagtagatgctgtccggcaacatatcaggaaatatagaaagcattcttatgtattaggagtaaatattaataagaatccgctttctacaggagatcaaattatcaaagattttgagtcgactttcatccatttatatgattgtgtggattattttaccctaaactggggtagtatagataacgacctgtttgctatggttttagaaaagctcacaatatttcgtcaggcggcgaacaaaagatgtagtattttcattaaacttccggcagatatagatgaaaaagcactggatacagtcatttcgcttgcatataaatactctatagagggctttatagccacgggacctacaatggattgttcaggattgcatcaggcagaaacaaaacaattggagaagattggcaacggcggggtgagtggccggggtattggaaagaaatcgcaggaagtagtgcgttatttatccgaacataccgatcggcactttctgattatcggagcaggaggaatcatgacagccgaagatgcagctggaatgatttctcaaggggctgacatgatacaaatctattcggctttcatctattccggtccgtctattgttcataagttaggaaataaacttaaaaacgaattgaaatgaagaatttaatttgtgtaagcctgtacgataatttatcgatgaaggtatataacttgtcggaagtgaataataaagagctgatggggatagtggaaaatgctcctgaaggaactttatttgtttttaccagtgaaaaatcaaatggtagcagtgttattatgtgtcccggcggcggcttcttaaagaccaatttggaacatgaaggtcttgatttcgccgaatggttcacccaaaagggaatgacttatgtgcttttcaaatatagaatggtaatacccatagaaagcgacttttattccgtgcgatttgaacggcttgagcggctgatggtcctcgaaaaagtccgaacgggcgaaacagaacatgaggcaggcttcccgatggcccgccagtaccgccagacggcaataacggtcgcgctctttggcggtagcggctgctcgtgctgctgcgaacgcagcagctgcagtcttccgtcgccagaaaccggcaagatacgacagcaggactgcaaggccgcacaaaaccatgaaccagagctttgcttccatattcattgggataaggttattccgacatacctgtacaaccggcagttttctctgccacgggagctttgcacctgccgttcacctgtttcaatgtcttctcgaaatatcttgttttcatgtatttatgcaatttattactgtgtaatatataagcaaaggaatgaattacattttgtctgctgacattcctaatattttttccatattgggacgaaagaaattgccccactcttccagtttctcaatgataggcaaaagggtttcacctatcggagtaatcgagtattcggaatgtgggggaagttccgcaaatattttcttctctatgattccatacatttccaatttctttaattgctgatttataacacgagcattggcttcaggaaacaatttgtgtaatttgctcggacatttagccccatcgcttagctcaaaaatgatacaacttttccatgtcccactaataacttccattgcaattctgattccgtaatcaatgtcaaaaggtattttcgatacccgattctaatttatattccacctcccagtgcatgataaagtttgataatactctgtatgcggtcaaagctggtttgcaaccggtttgtctctgcttcaaggagtgactgttgggtagttaatatttccagataggtggtaccggaatggcgcatcaacagttccgtctttcgcacagcttcacgcaaggtttcaacctgatgggtgtttatttcaaattgcgattttgccgtctgccatgcggttaaggcatcattcacctctttccccgcgttcagtaatgactgttggtataacaatctggcttcttcctgacgggtttgagcaattttcaaattagcgatatttgttccacggttgaataacggctgtgtcagcgaagcgattgcattgaacagccactgtccgggattggtgattaccccgcctccattgttggtccagcccaatgtacccgaaagagtgatattggggtagaaggccgagcgggctacattggtggcgtagaacgcttgagccagttccatttcagcccgacgaacatcaggacgattggataataacagcaaaggaactccgacagagattgtatcggggaaagacgcttctgccaaatcgctccgctcaatcgagtgcgacggcatggcaagtatcgccgacaaggcgttttctgtctcagagatacttttgcatatagcctgttgcgatgattccagctgcatcacgtttgcccttgcctgcaacacaccggcatcattcgccttgcccacctttttcaacgcttcaagtgtgcgcacggtagcctgccagttttccaaagtccgatgatttatcaccttttgcgcatcaagcagggcgagggtatagtaactgtccgctatcgtagcgacaagctgtgtctgtacggcctgccggtagtcacgacttccttgcaatgcggcaaccgcaccacgctttgctgccgtaagtttgccgaataattcaagctcccaacttgcggacgctcccacattgtacgcctttgccgtagctccgtcatatttgtttccactgccttccgcactgattcccaatgaagggaggtacgacagtctggctgtcatcagggcggcttctgccgcttccactcgcaggcgtgccacattgaggtcggtattctgccggagtcctgtctcaatcaaaaactgaagtttacggtcggtaaacatctcccgccatgacatggatgcaagcgttgttgtatcaatgccagccgggatgttccggtacagcttctctgtcggaatgtcagcccgatgataccggctgtatgtgccacagccggtaagcatcaaggttgatatggtaaataagatgatcttcttcatttaattacgtttaatccgttcttgaatatattgaaatgtgatgaacagtgacggtacgaggaacagcagtgccagcgtacctactatcatacctccgattacgcccgtggcgagcgagcggctgccgttggcacccacaccatgagccatcatcagcggaacgagtccgaacaccatagacaatacggtcatcaggatggggcgcaggcgaacctttgccgcactgtatgccgcctgcgcgagggtcatgccttccgaccgccgcttgccggcatattcggtcagcagaatggctgtcttggcaagcagcccgataatcataatcagtccggtctgcatgtagatgttgttctccagcccgaacagtcccgcgaacaggaagctgcccatcaaaccgcaaggcacggacagcaacacggcaaacgggatgaacacgctttcatagagggcacacagtatgaggtatatcaagaccatgcacagcacgaatatccacacggcattgttcgtcgtattgctttcttcgcgcgacaaccctcccaactcgtaggtgtaacctgacgggagaacgtggtcggcagtttcccttatggccttcaatacctgtcccgaactgtatcctgttgccggcgacccgctgatggaaatggcattgaacatattgaagcgggtcaggtccgacggaccgttggtcttggtaagacggacaaaatggctcaacggcgacatggagccgtcggaagtacggacatacatgccgtccaacgattcggtgtccatgcgatattcggcaggagcctgcatggtgacatggtacagttttgagaagcggttgaaattcgatacatattctcccgaaaaatatcccgagagtgttgacaggacatcggaaggagacacaccggactgttcgcatttggcagcatctatatccacccagtattgcggataatcagccgcgaacgatgaatagacctcaccgatctccggtctgcccgacaacgcttccacaaaccggtcggtcacttggctgaaggcggttatgtctccggcgtttttgtcctgcaagtacagttcaaaaccgttgcccatcccatatccggcaatcatcgggggcgacatggcgaatacggtggcatcgggaatatcggcggtggcggcataaatacggcctattacatcgttcaccgactgcccttcccctttgcgctcgtcccaatccgtgagagtgagaaaagacatggcctgcgaaggtcccgagccactgaaagaaaagcctgccacagtaccgttgtattcaatctctgcgatactgtcaagacggctgtttatacgttttagggttttgccggtctgcgccatggatgtaccgggtttcgtgttcatgctgaccatgaccgtgcctgtatcttcttcaggaataagtccggtcttggtcgtattgacaaaaagcaccaacagcccgaacgataccgcgatagtgccccacagcagccacctgcgatgaatgacatatagcacaccgcgcacataacgacggctcaaacggtcaaaaaccgcattgaatgccttgcggaagcgtgccgcgaagttgttcttcgtgttcccgtgctcgtcaatgtaaggcttcagcagcagggcgcacaatgccggagaaagggtgaaggcattgatggccgaaatgcccacggcaaccgccatcgtgataccgaactgcgtatagaacgcccctgaagtaccgcccatcatgcccacagggaagaacaccgccatgaaaataagggtggaggtcagaatggccgacgacacgcccttcatggcatcatcggcggcaagcaccggagactgatacccctcgtcgaacttcgcctgcacggcttccaccaccacgatggcatcgtccaccaccgtgcctatggcaagcacaagggcgaaaagcgtaagcaggttgatggaaaagcctatcagtgacattacggcaaacgttccgatgatggacacgaagatagaaatcgtgggaatcagcgtggacttgatgtcctgtaagaacacatacaccaccacgatgactaaaagtatcgcctcgataagcgtcctgatgacagaatggatggaggcattcaggaacttgttggtgtcggtaagcaccacaaactctgccccttcgggcaaatcgcggctgaggtcatcgagtacctcgtgtatctcattgatggtgcttgatgcgttcgaaccggatttctggtttatcatcatcatggctgccggatgtccgttcacttcggatgaataattgtaatactcatcgcccagctctatatccgcgacctctttcaatcgcaatacatcgccgccgggcagggacttgaccaccagttcgccgaactcttccgcagtcgagagcctgccccggtatttcatcgtgtactcgtttgccccgtcggagttctgtccgaaagaaccggtggcggcctcaatgttctgccgtgccaataccgccgaaatatcatccgggataagcccgtaccccgccatcttgtccggtttgagccacaaacgcatactgtagttcgagccgaacagctgtgcctttccgacaccgcctatacgtttcacccgtggctcgacattgattttcatgtaattgttcaggaaagtctggtcgaaacggtcgtcgggtgagtaaagcgcgaaagtcatcagctcggcattctgctgtttctctgtcgtgacgccgcttttggtggcttccgccggaagctggcttaacgcgccattcacacggttctgcacgttcaccgccgccatgtccgcgttggcaccctgcttgaaatagatgttgatggaagcatcgcccgtgttggatgcggtagaggtcatgtagatcatgtcctccactccgttaatggcttcctcaagcgggacgattaccgctttctgcacggtttcggcattcgcaccgggataggtacagaacacgttgacagtaggcggtgcaatgtcgggatattgctccaccgggagcactttgatggcgatgagtcccatcaagacaatcaccacggaaataacgcccgagaataccgggcggtctatgaaaaatcgtagattcatggggttacgtttttaggtgtaacaatcattccttcctttacaagtcctaccccttcggtgatgatggtgtcgcccacggacacaccttgcttcaccacgaagtggttaccatcgttcagacggtccacggtcaggtaggctgcttcggcctttccgtttctgaggcggtaggcgataatcttgtcctgcaattccacggtggcggtcttgggcagcaggatggcatccgcatccactccttgcaggacgatattgccgatggtgccgctcagcagctcacggtcggggttggggaagcgggctttgatttgcaccgccccggtggtggcattgaccacgccactgacagtctctatgcgtcccttccgtccgtagaacgtgccgtcattcagttgcaggccgacttccggcatttgggaaatcatcttgtctatggaaccgtattgtgtcctgaactgacgcagcttgttttcggagacggagaaataggcgtacatttccgcattgtcggaaactaccgtgaagggctgcgtcatgccgggactgacaagtgcgccgatgcggaaaggaagcgtgcctaccactccgttgctgggactttttatctcggtataggagagattgttgcgggcatccgtttcctgagcctttgcctgttcgagttcggcaagtgctaccgccagcccgttgcgggcaagagagagttcgtaatcggatatgactttctcatcaaacaaggcttgcttgccttgcagctcgatccgtgccgtttccacttttgcctgtgctgcgctgacgtttgcctgtgcggtgcgcaaggctgcctgatagggcacttggtcgatgacggcaagcacttgtcccgtcttaacctgctccccttctttcacacacaggcgggtgatacggcccgacacttggggtactatgtccacatcctgccgcccacggatggaggcggaataactttcttgaaattcaactgcccgggaagaaaccaccatgacgggcaatgtctgtctcatttcctgttccctctgttcttgtttgcaggctgtcaataatgcagccagcaggcttgttaccgtgatgccggctatccatgttcttctattcatcatctgttcttattgtttttccattccttattcaataccgcataaatgcaggtgtcctcataccgtggtgttccatcgggatggcacacaaacgatatgaattccttcatgcatccttcatatctcattccgagacgttcgcacaatcttttcgaccgcaggttgtcatcctccacaaagccgtagatgcgacgtgcgcctgcttcacggaaaaggtaatccagaaattccgttgccgcttcatgcgccaatcccttgccctcgaagcgttggttgaaatgccagcccacgttgaatgtgtcggcttcttcacgcaatgcaaaaacatcaccgattatgaaatcgtcttccttcaggcacacggcatagcgcagcaactcctttggagtattggatatataagccagtgcagactcttcagagcacaagcgttcgctcacgaagcagttgacacgcggatgggagaggtattccagcaaaccaacggcatccttctcctgaaaatctctgatgataaggtgttctgtttcaataatcataagtcgccaattttggctgcaaagatattccatacccaatttgccgacaaccggcatgcagtcgaaacggaaaaaaacatttataaaacagctaaaatggcttctgaaatgtcattgtaaatgctcttttcaaagatgcacatctttgggcagttaagccatgcttcttgatgcgtcaccttcctacagattaccaaaatcataccctgttttggcaatctacgttcattatgcaagcatcgaatacagtataaatgatagaaccatctgtctcgacactccttttatctgtttcaactgctgttttgtctgtttcatccggtttcgacctatcaaatgaaaaagcaaagtcgtacctttgcaacatgaagtaactttgcaaccaaatatgatcaaagaaaatgtaaaaataatgaactggcggaacggcttcctgctatcgctcgtttcctatatcctctaccttattatatggttaattcttgatgacgaaaccgccaaccaattaccgggaatggcgacagtcgattatgtcgtcgattttttgttgtgtatgctctttacctacatatccttggggttctcttaccttgtttttaagattttgccgttcagaacatcttatgtgtgggtgattgtctatgcttcctgtcttttgacgctgaataacctcgttacgttcggcatgacatctctgttcaatcttttgtgggatgaaaccggcaacgggcttcttgacgaactgatcaacatgaagggggcttacacttttgccatgatagccactttcatatcaagcgtttatgccaacacattctacctccagtcatacatcagggcgcgcgatgagaagcaggctcttgaaatggcactgatgaaggagaaggagattgccttacagtcgcaactcaactcgctgaagctgcaaattaatccgcacttcatgttcaacaacttcaacaacctgctggaattgatagaggaagataccaaacttgccggcaagttcctgagtaacctgtcgaaagtgtaccggtacatcatcaccaatctggaccggaatctgattcccgtcagagatgagataaagttccttgaatcatacttgtatctgatgcaggtgcgccacgtcggaggggtcgtcacgaacatcagcctcgaactgaaagaatgcaaaggataccttcccccggccgtgttgcaacttcttgtggagaatgcaataaagcataacggtttttcgatggaaaatccgttgtttattgacatcacgttgtctgacgactatatcacagtgcgcaaccttaaatctcccttgctctcaaaaatggaatcgaccggcttgggtcataaaaacataatagagcgttattcgttgctctgcgataaaaaagtcaagatagaaaatgccgagaacttctattcggtgagtttgcccatcataaaaaaacagtccctatgaagatactgattcttgaagacgaacagcgcaatgccatgcgtctcattagattgctgaacgacattgatacgacgtttataattgaaggaccacttacaaatatcaaagaggcggtcgattttttccaatcaggcaaaacaacagacctcatccttgcggatatccgccttactgacggcctgagttttgaagcgcttaaatatgctccggcaaccgttccaatcatattcaccaccgcatacgatgaatatgcggtacaggctttcaagttcaatagctttgactatcttctgaagcctttggatgccgatgaacttgaagctgccatagataaagctaccaaagctggcaagaattatgctgacgaaaatctccggcagcttttcgattcgttgcagaagaaccagttccgctatcgggaacgtttcctgttgccctatcgtgacgggtataagaccgtacgtgtttcggacatcaaccatatcgaaaccgaaaacaagacggtataccttcgtcttaataatggaacttcagaagttgtcaatatgtcaatggacgaactcgaacagcaactcaatcctgattgcttcttccgtgccaaccgccaatacataattaacatagaatacgtattgtttctttctaattatttcggagggaaacttattgtccgcttaaaagggtatccgaacacaaaaataaccgttagtaaagagaaggctcaacggctaaaagagtggattgacaaatagtctctgccatgctatgataacatttctgtactcactttcagttagaaaaaactgaatatctcgctactccatgaggaacgcgcggatattctttataatcgcttgttccagttcgtattcggaatgttctttcgaaaggcccacaaggtcgaatgtatattcgtctttcagggcaagtatggcctggttctttatcttctccggcaaggtcatgtcgaagttgctctgaccgagcagataattttcgtaggtctttgcttctatcttgttgataagtacatctttcgtccagccgtatttcttggttgacaagatgtagaattgccgttgttgcatctctttgcacttggtcagaatgacgatgtgcttcgaccagctaatttctccaactaacggttggagaatttcattcgaccggtattcggtataaaaacgggccatgtcccacatgttggaaacaccgaatccctttatacccagaaactccttttgtatgtaccgcgaaaggttctccatgacggattttccccagcccaaggccgcttgttgttcggtaatccgcctgccgatttcccaatacagggcgatcatctctttgtttacggccttcaatgcctcgtattggggcgaccggatgcgggaggttatctcgtttctgaaatcgagatattcgggagataagatgggagtattcttttcagtcataggttattcattataatcggttacaggggtaagtttttcttttgattatgcacaggattcccttgtcttatcccatcttctccggatttccggtctgtcggcagcattccccgttgtacgacgctttctcccttttctatacccgttccgtcctttctcccttgtacgcattttcctccctcttttagctgtcggtttccgtgcccagccttgcagcgacctgcggggtattatttttccgcgaaggtaacgggccgttccaatcttgccaatgccggctgcgccgcgagtgaggcgcaaaaatcttcctctccgttgtcgagcgtattttttcgcttcagccttgtccgattgtccctgccaccttcaagaggcagaaaaataatcccggaggccgcaaacaggccgaataaagggaaacaaacaaggttaaattatgagttacagcaaattaaaatcactggtggcaaacgtggaagccattgcaacggcaatgaaagtccgtatcgacgaccgacaagccactgacgaagagaaagaggtattatcccgatattccggtttcggggggattaaagatgtattgaatataggaacggagcataccgtcagcgatgatgtggccgagcctatccgcaagctgcaggacttgataggcgcatatccctattatgacgacgccatgcggcaagccgtcatcaacagtataaaatcctccgtcctgactgctttttacacaccgaaattcctcgtggacgcagtaacccggcagatacacgctacattcaaggataactgcctgcaaatgagtacctttcttgaacccagtgcgggaattggcggctttctgcccgtctccatgcccggcactcgcagctacgcttttgaaaaagattgtcttacggggcttatcctgtcgcttctgtatgacgaggcgaccacggtaacggcaggcttcgagacgatagccgaccagcatctggagcatgagagcttcgatgttatcgcctcgaatatcccgttcggcaatttccgggtgttcgatgcggaaatgtggaagaaaggcggcatgtacgaacagtcagccaagaccatacacaactacttttttgtcaaggcaatggaactgttgaacgagggcggactgctggcgttcgttgcgccgagaggaattgccgacacgccgggcaacaagttcgtgcgcgagtacctcgtcaatcatgccgacctcataacggccttacggctacccgatacccttttcatgcagacgagcggcatagaggtagggagcgaccttttgatattccaaaagcacagccgcaaggcgacgctctcgttacgggagaagatgtttttgcaggtctccaaggaaaaggtcgacacggcaggaacgatgaccgactatgcgaacaaaatctttaccctccccaagaccgcccttgccacggacagtcgcattgcgctgaaccagttcggtaagtacgtccgcaaataccagtggttaggcgatggaaacgccatgtcccaatacctttccgcactgctcaaatacgatttcgaccgctattttcgcaaggctctttttgccaatcacggccaggacaacacccccgtgcagatgtctcttttcggcgagccgcagacggtcaaaggcatacgtgcctacacggaggacatggaaacatggatgaagaacggcgcaatggtcgttttcgaggggcaggtaggtacgcttcggtttcgtaagtcgagccgttacacggagacagccgttgatttcgtacccgtggacgagggcaaggtaaatacggacagggccgccgactatttccccatacgcaaggtgtatttcgagctgtccggcagggaacgggaagaacaaaaggagtgctcggaactgcgtaaacaactcaacaccctatacgacgcttttattgccaaatggggatttttccacgacaacgacaacaaggagtttatcttgctcgacagcctcggtacggaggtgttcacgatagaaatgcaggtcggcagggacatcttcaaagccgacgttatgcgtgaacctgtagctttcaagaagatagacaccgccgtaacgctgtcccccgtggaagccttggcaagcagcctgaacttttacggcaaggtcgatatgggctacatggcacaagccacgaacaaggaggaagaagaaatcatcgaagccctgcaaggggaaattttctacaatccggccaatggggaatgggagcacaaaggaaagttcctctccggaaacatcatcgccaagcaggaagagacgctttcctttctcccgaatctcgcaggcaaggagaaagaatgggccgaagcgtccgcaaaggcactggagaacaccatacccgaaccgataccctatgaagaactcgacatcaacatgggcgagcggtggatagatacgaagctgtacgccgatttcgcctccgacctattcggagtgggtgcggacgtgatgtatttcgacgtgaacgatacctacttgattcggctgcagggatattcgcccgtggcatacaatacctattccgtgcgcaattacaacggcgaggacttgtttgtacacgccctgcacgataccgtacctgagataacgaaagaggaataccggaacggcagcaaaatacgtgtgccggacgaggaagccatgcaggaggccgccgccaagatacaggaaattagagaccgtttcaaccggtggcttgacgatgagcctttggaagtccgggacgaactggtaaggacatacaacgagcgcttcaattgttacgtgcgtccgcactacgacggctcggcgcagacgttccccggcctctctttcgagctgttcccgtacaaagaactttatccctcacagaaagacgctatctggatgattaagcagaacggcggcggtatctgctggcacgaggtcggcacgggcaagacgatgattatgtgcgtggccgcatacgaaatgaaacgtctcggactggtgcagaaacccctcattatcgggctgaaagccaatgtacacgagattgccgatacattccgaaaggcataccccacggccaaggtgctctatccgggcaaggaagatttcacccccgccaaccgcaaggaagtgttttcaaaaatcaagaacaacaactgggattgcattatcctgacacacgaccagtttagcaagattccgcaatccgaagaaaccatgtacgacatattctcggaagaactggccgatgtggagcgcagcctcgaagtgctggagcaatccactatgcgttaccggagcggcaggatgcagaaaggactggaaacccggaaacagaaccttgaagccaagctcgccgaactgcagatgaagatagacctccggaaagacgataccatcgatttccgttcgatgggcatagaccacatttttgtagacgaatgccactgctataaaaatttgatgttccagacacgccacacgagagtagcgggcatcggcaatgcgcaaggctcgcaaagggcgatgaaccttttgtttgccattcgggacattcaacgccgcacgggaaaggacttgggggctacgttcctgtcgggtacggtggtcgtcaatgcgctgaccgaactgtacgtgatgttcaaatatctgcgtccaagggaactcaaacggcaacaagtaagctgtttcgacgcttgggcggctatcttcacgaaaaaggccgccgactacgagctgaacgtaacgggtacgataaagcgcaaagagcgtttccgcacttacatcaaagtgccggaactggcgatgttcctgcgggagattaccgactatcgtacagccgatatgataaacctcgatgtgccggacaaaaacgtgcgtttcctttcccatgcacccactatccaacaggaggaaatgatcgggcggctcgtcgcctttgcgcacagcggacaatgggaagatttggggttggatattccgcagccggacaatctcgacaaggcaaaaatgcttgttgctaccaacgtggcccgtaagatgtctcttgatatgcgtctgttgggcgataagtttactgatgacccgaacaacaaggcttcgatttgcgcaagaactatttatgattattatgtaagttcaaatgccaatcgtggtacacagttcgtcttcagcgaccttgccacttacaagccgaacgagtggaacatctatagcgacatcaaggacaagctggtggcaatggggattcctgccgatgaaatccagtttatccagtacgccaagaccgaacgggcgagaaagaaactttttgcggacatgaacagtggcagggtacgggtgttgttcggctctacctcgatgttgggaacgggagtaaacgcccaagaaagggccgttgcggtgcatcatctggagataccttgggtgcgacatgaagtcgcatagataattgttggaatgatacttacgggtatcagctttaacccgctgttccgtcagcggtagcctaccaccgatgcaccttaatagttgtattaagcggttgggacaaagtacactttcgcaagacaagacagaaccgtgaggggaagtcaagtacggttagtatcataccgtagagtggcgaggcaggatagtatggttagcgcaagcgaactgttagtaaacttcgtaatgtcacgaaagagtgtaagatactggtacactctacccaaaagggaagcggtcggttaatcctttccatggtaggattacacggatataagcaccgccggaggatgagacagaacctaacctatccgttagttatctatgtggaacatggtaagcctgtatatctcctgccatgtaaaaatggcaggtaagctgacagcaatgaaagccgaatggtgtgcaggtataagataacagaaaaagcgaatgccgttctgtaatggaacggatacggattgaaccgacatcacgggctgatgtaggcgacatcatccgacacgaaagtgggcagacttctgtggcgacactcggtaggcaaaacaaaccgaatgttgccaaatggtgattctttacaatagacttttagaacttttttaaagtaggaatgcaaatgaacgataaaatcaaagaaaaactcctcgaccaatcgtgtgcaccgactgataacttgcaaacgaattgggacaggatagactggaccaaagcggagcaggctgttaagaagcttcaagctcgcattgtaaaggctcagaaggaaggcagaacgggcaaggtgaaagccttgcagtggacgctgacccactctttttacgcaaaagccttagccgtaaagagagttacttctaacggaggtggtagcacccccggggtggacatggaaacatgggagaaacccgaagcaaaaacacaagcgataagtgagctcaaacgcagaggctacctgccgaagccattgagaagagtccacatcaaaaagagtaatggcaaactgcgaccgttgggaataccgacaatgaaagacagagccatgcaagcactttacctcatggcattggaaccagtgtcggaaacaacagccgacacacgttcgtacggtttccgcaaggaacgtcgctgtatggatgcggtacagcaatgtcataacattctccggaaaggctattctcccgaatggattttggagggtgacataaaggggtgcttcgaccatatcagccatgaatggttgcttgccaacatccctatggacaaagcaatactccgaaaatggttgaaatgcggctatatcttcaacaaacagatgttcccgacagaggagggaacgccacaaggtggcattatctctcccacgcttgccaatatgacattggacggattgcagaaagtccttgcagagaaatataaacgagttagaataaaaggcaagttatattcgccaatggtgaatcttgtccgctatgctgatgactttataattacctgcgagaaccgtgaaacacttgaaaaagaaatcaagccattggtagccgactttatgtctgaaagaggtttgaccttatccgaagaaaagacggtgataaccaacattcgtgacggtttcgatttcctcggtttcaatattcgcaaatacggcaatgaaatattgacaaagccgaccaagaaagccgaaaaacgctttatggaaaatatccgtaaggttacaaaaggtcataagggttgcaagcaggaatcattaatcagaatgttgaatgctaaaatccgaggatggggagcatattatcagcatggggcgacacgtgattcttttcacagaatcgaccatcagatatttctcgccttgtggcaatgggctaaacgccgccattccaagaaaggaaaacggtggataaaagaccgttattggcacaatatccgagggaacagctggacttttgcggctaagttcaagaaatcaaacggcaaggaagaccaactcactttgctgaaactggcatcttcgtttcctttcctgcaatatacgcagataaaaggggatatgaatccgtttgacgcagactgccgcctgtacttcaataaaagaatgaagtcaaagatgcttgtgacactgaaaggacgtaagtccctgctttacctatgggaaaagcaagggcggaaatgtccgatatgtggtgaaccgattgacacgtataaggcatggaacgtaatgccaaccgtccaagacggacggaaatgcaatctgttggttcatgatgaatgtttcaaattatcccgtaaaaacaatggaaacaagaagtaggatgagccggtctctgcacacgaacagagactttgaaaagcttgagccgtatgaggggaaaccctcacgtacggttctgaggggggaagagggcagtaatgcccttgacctacccgatcgccccgccgacatggagcagcgcaacggtcgtgcggtacgcaaaggcaacaccgttaagctctggggaaacaataccgtggacgtggtgatttacggaacggaaaagacgctcgacgcttacaaatttaacctgttgaaaaccaagcaaatgttcatcaaccaaattaacaacggtacgattgctgtgcgccgtatcgacgaggacgctatggacgaggataacggcatgaatttcgccgagttcgtggctctcctgtcgggaaataccgacctgttggagaaaacgaagctcgacaataagattatgcagctcgaaaaggaacaggccattttcaagaaagaccgtatcagggccgagcgtaagattgcggccaaccgggaagacatgacaaaggccgagagtgcggcggcacgcatgacgcaggactgggaatatatcacctcttacaccggagaccggacgacccggctgttgaacctcgcacaagccacggcggaagagaccggacgggagctgcaccgcatttccaagacctaccgcaacggggcaatcggtacgataggcacgtatgccggattgaacctgtcggtgtacagcgagtatgacatgggcggtacattctaccgcaacacgttcctcgtcgagggcgtaagcggactgaaataccgttgtggcatatcgggagcattgcctctgggcttcgtggaatcctcccgatacccgcaagccgccctcgccaagctgcccggcatgattgaggaacaacggcagaagatagccaagctggagagcgagatacccgctttgcagggaatcatcgcccgcaagtggagcaaggcggacgagttggcaaggctcaaacaggagtgcaacgctttacagcatcggatcgacgaaagcatgaaagaggcggaacgcacgcagtccgccctttccgaacacgaggccaccgacaaagcggcatgaccataattcatagatttaaccttttccctctgttcggttacaacaccggacaggggattttttcaccttccggtctgccacggccatacccggttgtaacggaatcttccccttgtacctccagccactccttttataccacacaccttgtcttttataggcaggctttcgcttcccccccctttgtagattgagatgctatcacgaaccgacgaccgtaaagcccgacacttttttccgcaaagttgattgcatctcaaaactttgcctcaaggcccatcttcgattttcctgatgaaaaatcttccttctcattccattccaagagtatttttcatggaatccttgctgcaaaccccgtgatgcaaagacgaggcagaaaaaagaatcgaactttccggtaatcgctcgaaccggagggaaataaaaaaaacttaaaaacaaattgaaacatgaaaaaaaattcgctttttgacaactggttcgtttacaactatcagagattgcgtaacatattcggacgttacctgcacgaggacgcctttcacgacgcctatttggcgatgaaacgggaagtcgtgatttcggaaatacctgtcgagagcttcgagccttattttttcggcgtgtacaaaaagtgcagactgaaatgtattcacaaggatagttgttactgtttccccgacaacgaacatttctttttgctcatgcaggaagaagaaacaccgtccgtcgaggtgctggcagcttccgacaagctggtgtatgacatactgctgtttgtgaagaagaaatatccccaaacggactacgagcttttcagactgaaagagtacgaggcgaaatgttcatacagacacctttccgcctatgcaggcatttccgcaagtgcgatacaccggagaataagcgatataaccgacactatccgcaatcacgaaggattttccaaaaggtacgcccacgtaagcatgtaatttgtataacccgtaaataattcaagaaaatgaaatttgtaatttacaacgtcgagaattgccggacaagagaaaaccgtgtaggtaaaagaagcataaggttcaacagcgttaccggcaacatgtatctatccaccaaattggcaaaagaaatgaatatcacaatgaacgaccgactggagtttggctgtgatgaaaacaacccgaaagagtggtttctgcacaaaaccactgacaagcgaggttttccgctgcagttcaacaggggaggaacacgtttgaggaataagtacatctgtaagaccattttggatatagcgaaggtcaaggagagcgcaacattcttggtatcgaaagacccggtaaagaccgagctggggccattttacagaataatactttcttgccccattctcccgaagaacaagcccaaactataagccgataacctctgtggtctgtccgatgggcgaaagccctccggacggattgcggggcaaccgataccttttatagtacgattactccttttttaccttcaggctgtttccctattatacgccggctttcccaaccccgtgaaccagtggaaagtctgtgccgtaacaagtcgtcagggaaaggtacgggaggccgttcaaaaccggcggcagcccggatcgtgccgttccatgccggagcttcgacctgtcgaaacaacacggtattccacagcccgaccggtctttatgccgctggtttcggactttccgcctctgttccgtatctttcccttgtgacctgccacgtcaagggcaaacggtgatacttcttattcgctccgcgctttcattccgcccggtcgaaattcaggcgtggagcggataaggagaatccctttcatgtttgccccggcagacccttgccggacccgcccaagccggacccttttctacttcgcttcccctgcatttatacaggcaaagccgtactccctttttaccatcatatttaccggtctgttccggtctcctctctgccggtgtcgtccggtttgccagatgcaaaggtcggctgccatgcttgatccggcggcttgaagtgcattccccgcaaattcttcctttccatgaaagcgtaattggccgggaaacccgccgtatgaagccctgtcggcagccgtgttccgcatctgtaaaatcccggaacggttcagacagagagaagaatcgaaaaaagggtaaaaaagcagatgtttcacggcataaaagacaagtgatggacaagaaaaattgtaaaacaggcaaacgcatgaaaaggcaggttgaaaaaatcctgatggttatcaatgtcaaatgggaaatcatagatattcttcaaataaccaatcggcgttttatgtacaatccgcaaacgggaactttaattttaggagacgaaatctacggtaaaaccatttgcagttcccattcacaagagttccatgcgtcaagagcagaaggctgtttcgatgattatttgcgcgggtggattggcacatcgaaaagctaccctcacgggattatccattttgcccccgccgtcatcatggaacagttcgacagagggtttgacgcattacaaatgttcgccggacttgaaggcgtaaacggagatactatcgtcagagggttttgtactttgccagaacaaaggatgggcgatttgctgcattcctccctttgagataccggttctgacaaaataagctatgataaggtatcgtgcctatgacaacatcgtcggtgaagggcacgatacccgtttgtaaattaccgcaactccgttggcggtttccttttatacctctctcttttcctctgctcttatacttgggcgaagccctcttccctttatatcaattatatgtataacctctacggtctcctctctgccgtcaccgtccgatttttcagatgcaaaggtaggctgccgcgcttgatccggcggcttgaagtgtatttcttgcaaattcttccttctacgaagagtaattggcaagaaaagccgtcgtatgaagctgtaccggcagccgggtaccgcatctataaaatcccggaacggttcaggcagagaaaggaaccgaaaagagggaaaaaataaacagttaggtaacggcaggaccaaccaccttgccacaaacaattttctattatgttacatgttcacactatcggacgcatcggcaaagattgccaagtaatttcaggagcacacggctcattcatggctatggacatagccgttgacgattattcaaaggggcaaaacatcaccacttggataagggtacgcagcaacaaggacaaccatatccgcttgtccgaatatctgacgaaagggagactcatacttgttgacggcacgctgtcatcttccctgtggaaagacaagaacggcgagagccagatacagctctccatcacggcagagagtattgcctttatcaataccggaaggcgggaaggcgcggcagccggagaggacaatgcagtaagcggagcagacggcgcacccgttcctcctgcagatttcccgcaggacgaaaaggaggatttgcctttctgataagagagtaaacctttgaaaataagcgaatactaaatgtagtatatcctatatgtagtagattagtaagccactcgtctgcgaatgtaggatatactactcttagtcaaactttattttagtatagtagtaaatactaaaatactacactgctaaaacaatagtttttagtgaattagtatatactaattttagtatttacgaaaaatagtattaactttgcaagtggaataaaagagtgaaacgatgacaaaaataattgcggtcttgaaccataagggaggggtcggaaagacgaccaccaccatcaatctggctgcggccctgcagcaaaagaaaaagcgcgtgctggctatcgacatggacggtcaggcgaaccttacggaatccttcggcctctccattgaggaagaacagacggtgtacggggcgatgaaaggcaaataccccttgccattagttgaaacggcaggaggtgtaaccgtcgtaccgtcctgcctcgacctctcggctgccgaggcagaactcatcaacgagccgggacgggaactgatattgaacggcctgattggcaagttgctcgaaaaccggaaattcgattatatccttatcgactgtccgccctcgttggggttgctgacgctgaacgcccttaccgccgcagactacctgattatcccggtacaggcacaattcctcgccatgcgcggcatggccaagatcatgaatgtgattgccaccgtccaggaacgcctgaatccgaaactcgctattggtggcattgtaattacccagttcgacaaacgcaagacactgaacaaaagtgtggccgaactcgtcaaggattcattctgcgaaaaggtgttcaagaccgttatacgggataacgtatctttggccgaagctcccataaagggcaagaacatcttcgagtatagcaggaacagcaacggagccaaggactacatggcactggcgcaagaggtactgaaattaaaataatcccgatatgagcaagagcgatttactgaaagacagcatgaaaggcggactggacgggttgctgtcacctacgaaaaagactaccggcggaaaacagccggtagcagcccccacggaaaaagaaacggcggttcattgcaacttcgtcatcaacaaaagcattcatacccgtatgaaattcctcgccatcaagaagaacatgtcgctgaaagacatcgtgaacgaggcaatgaaagagtatctggagaagaacgaacaataaacacaggcatggctaccgcgtctgcccaccccggagacggcagccatgcgtccttttttatccgcccgctgtttccatagggcgcattcctcctttatagtcttaccatctttctcttttttacctgcccgcaagtacaggcacatggcccgttttatccctattctaaccctgacgggcatatcccttttctaccgattcccttaccgctttcccggcttcattctctgccgtcaccgttgtgttttatcagatgcaaaggtccgctgtcgcgcttgatacggcggcttgaagtgtatttcctgcaaattcttcctttctgcgaaagagtaattggcaggaaaagccgtcgtatgaagctgtaccgacagccgtgtaccgcatccgtaaaacctcaaagcggttcaggcagagaaaggaaccgaaaggagggaaagaaaaaaacaacgtaaaattgacagcgatatggataaaatcaaattggtagtttacaacgagtacgcactgggttatatcatgcccgaacaacccggcaaagtttgtacgttggtggataggataacgctcggcgcaccgtttcggacaatgaatgaaccctatttcatcgggaaaagagataccgtcagactggcgggcagaaaggactttgacacgtttcggatagtgttcgacgggtacgacaatccggaaatatacgagtatgacaccgcacaataaagacaatagtaatcaaacaatctaatgtaataacaaattaaaatttatgaattatggaaacagcgaacattcaatcagtagtagagaacaacatcgtatcagttgcattgatgaatattcaaccgagcaactataacccacgcaagcactttgacgaggcgagccttgccgaactggccgagagtattcgtcagcagggagtattgcaacctatcggcgtgcgccccattgtggacaccgaccgcttcgagattattttcggagagcgcaggtatcgtgccgcccttatggcagaactgaccgaaattccggctgtcatcttgcatgtttcggacgagaccgccgccgaaatggccgtgacggagaacctgcaacgcaaggacgttacccccatagaggaagccaacgcctaccaaaagctcatggaaagcggtcgctacgatgtgcagtcattggccgtgcagttcggcaaaaacgagaactatatccgtacccgtctgaaattcgtatcattgatacccgaaatcgccgaacttctggaaaaggacgaaatcacaatcagtgtagcgagtgagatttgccgatacggtacggacattcagaaagaggtgtactataaacacttgaaagacagcgacagcatgttgtacgactgttggcgaggactgaaagccgccgatgtggcaaagtttatcgaacgggatttcacgacagaccttagccgttacgcattcgacaagaccctatgcgcctcatgcccccacaataccaacaacatgatgttgttctgcgagggtggttgcggaaattgcgccaatcggagttgtctggccgaaatgaacgcttcctatctcgtggagaaagccttgcagtttgtggaacaatacccctccgtatcattgggctaccaagatttcaacaataacatgcttgcggtggaacgccttaccgctatggggtacgaggtcgagcacctcaatacctatgccacggcataccccgaaacgccggtagcacccgaaaaggaagaatacgacactaccgaggaatacgaggcggcatacaaggagtacgagcaggatttcagcaactatatggaaaaatgcaagtcaattcatgaacgaatcgatacgggcgaactcacgttttatatctgcatcgggcagaaagaaattacgctgtgttacatggcaagtgctgccgccaatgcggacatggctaccgaaaaacaactttccccggtggaaaaattggaacagcaggacaaacgtaacaaggaaatagccgtcgagaaaaccgttgcagacgctaagaaacagattttggacgttgatacgtctgaaagcaaattcacgcaggacgaggaaaagatgatatatttcttcctgctgtcgtctctccgcagggaacacttcggggtattcggtatcggggagaaaaaagcctaccaacaccttgaggacgaagaaaaaatgaacatcatcgccaacctcacggccaagcagaaagccgttatccgcagggatttcttgatagacaacttcaaaggcgcatacggcaataacgctgctgcgaccctcttgctcgattttgcccgtaagcacatgcccgacacgctcgccgaaattgaaagtggatataatgaggtgtatgagaaacgccataaacgtatcgaggaacgcaaagccgccttgttggcaaaggaacggcagacaaagcccgaagaagccgccgaggcagaaaatacacaacccacggcagaggtacaacccgaagaacatacgcaacccgaagaggtcgcagcttgaccataattcaatagtaggacggagaaatccgtcctactgtctaaccaatcaaaagaggtaatgatgaaatgtaaggactgcaaacattacaacggtgcgacaatgcccggagcgggattgtgcaatgccacgcaggcacgtacttttgccacgacggtctgtttcaatggactgttcaccccgaaaaaacggcaagacgaaccggatagcaagaccgggaagaaatagcgcaacgctacagagagagagccgcaggagcggctgtcttttttagcactgccgttggcagatctccctttttatcccttcgttttccttttgtacggaaatcccttcgccaacggctctgcccgtcgggacatgctttttccggtgcaaaggtattgccttggaggaacattcaagtaccgctacgctatttgaacacaatttttcagcagctttcccgattttcaatcgtccatatttcgcggacgctcaataccgcaactataaaattctgcccaaattccttgcctgtttctccctgaaaggcaatctttaatgcacgtaaaaatcaaatcccgacaggagaagcctgaaggcttccgaaaggagggaaaaaataaacagattgttcaactgattaatgttaagattttatggaaattcaatttgctatcgtgcgttccgaaaacagagagtatttgtgctacaaagcaggtgaagcgtatgtagatgccagcaaccctatgattgcttttaccgcaggtgaagatgaatttgaaatcgtagagccggacagctctttcagacagaaagaatacgagttcagaggcgaacggtattacctcgtaccacggttttatcgcaatggctggttggctcttatcttggtaatggtggaagatgaagacgaatatatcgtactttccgtcaatttggaggaaatggatgcgctcggtttgccggaccgtacctttatcgacgtgaacaattacccggatgcgttggactttttggtagaaaacagattggcgaccgattccggctacaaacgcaggagcggcttcgtggaataccctatggctatgttgaacctgccgcttctttatcagcataacccgcaaattttccaaaaagcgaacatcgagccattcggagaagaatgcttttgaaaaggattgttcccaaaaatgaaagtgtcgggttccgaagattgaatgtacaagatggcgtactgataacacagtcagtgcgctatctcctttgtctttatcgcccgccttcgtccttttatagtcagcctcccggataccccgccaccgcccgtttcctcttataattgcattctttcccttttgtagcggcacgagccgcctgtttctcccgtccggctttcccgtccctcaccgcacgggttttatccgatgcgaaagtcggtcgtcgcgcttgattctccggcttgaagtgcacttcttgcaaattcttccttcccaagcgaagcgtaattggcaagaagagccgtcgtatgaagctgtgccgacgaccgtgtactgcatcagtaaaaccccgaagcggttccaaaggaaaaggatcgaaaaaagggaaataaataatcaataattcacaagacaatgggaaaatacgattttatcaagacagggaatctgctttattggcatgacccggacaacggtttgtccgatggggcttaccgagtgatttctgcaccggaaaacatggaagacgacagcattattctgatttcgtccggtacttcggaagcggaggttttgccttcggaattatcgccgataaacacgggcagaagtcataaagaggattttttgcgctggaaagcggaacgtgaagccgaaggcatggagttttataatcgcctttccgaagtcatggaaacggaggacgatttggccgtaggcgacatggtagcatttacaaacgattatggagtagtattcggccctcaagaggtattagctttcaggaagccttggaatggtgacagatgcgtatatcttgacagcgacgcctattggtttcccgaccgtcccgaccagttgaccctcctaagcaagaaaggggcggaatgacaacgacaaacccacccgccacaaaaacgggtgggttcatttcccctgcatgaaatcccatgctctattttaatcggctcgcacgcactccactcgtgcagcgatttccttttctatcgttcctatccattcctctccgacaccggcctcccggccgtattccgggtaacgcgaaacgatgcctatggtcttttctatgaacggctctgcggcctttataccgtaccggcgggctacttccagcaggtctgccgcagtaataccctctgtccggttgttgatagtcatgctgtggcggttgacgtaatacggtgcgtccggatcgaccgagaacgtgtagtcgtaggccggagcaacgtgccaacgcccgtcatcgcccatcaggaagctgaaattcttgttatggtcatcgacgttcccgcccagcacgttcagcaccatcaagcgaaacagttgccggagttcccccggcggcacgccgatacggcaggccgcctcgaatagtgcttcgtaagaatctgccgaggggttcatggcagccaatgtctggatatgcaccttcttgccgttccggcggtcgaaacgctcggtcaggaagtgcgctgtctgctcaccttccaacaggcggctcggcatcatctgaagcccggcgtctacggccatcaggtaataactgtattctatccgtgtcgtcggcatcttctggtgttcgtcgaacttgacgatcatcggcgtgtagcccggataaggggtcgccacctgtccggagtaacattgtccttccccgaaattgacgttgaccaccgctttgggccgtcgtcctcctgcggacgttcctaccttgaacaggctttcgaccatcaggttgcccgataccgggacgttgaaccgtccggcttcctcgaaagcctgccgggccagttggtagaggtcagcgatctccaccttgaacggtgtctccagttcctcggcagtgggcgggacgaactccaatgcccccatgccgcgccgtccgatataggcgagacggtcgagggcggacaagtccctcatacggatatgatgcactttggcccattcgttgaacacggtgtttccccaatggtcgggcagcgaatcggctatgaacgagggcaggccgccgaaaagccgctcttcatcgggatagaccggcaggccgcgctgtgcggcaaccccttttaccggcgcacggagcggggcgatgtcgtagccgtcgcggacataatcgctgtcgaagtagaaacaggctttgctgcggtgtccttcccgattggcgacaagcgtgccgacctttttatcccataggattacatcgagactttctatcatttcttgcccctcctaactcgtttaggtatcagtttctcgatttcccgaagcgccatcggcggcatgggaagttccggcagaatctccgcgagccgctctgcctgaccgagcgcacgcagcagggagatgaaattggccaaggtcaggttacggctgaccccctgctcgaaatggctgatagtcgtctggcttacacccgactgttcggccagctccttctggctcatgcgggcggccagacggtactccttgacccgcttcgccaaaagcgtcagcatatcgctgtttgtggtatagttcgttgtttccataatgtcaatatatcactatttatatgcaaatataacaacaattatccatatatagatatataaattctcttttttagcttccagccgtccttttctaccgctttcaggtctccgtattctctcccgtctggctttcccgtccgtcaccgcaccggtttttatcggtgcaaatatgggctgtcgcgcctgattccgtcgttttgaagtgcatttcttgcaaattcttccttctgcgaagcgtaattggcaagaaaaaacgtcggaaagggctttttcgccagccccggaaagcaccataaaacccgaagcggctccggcaacaaggaagccgaacagagggaaagaaaaacaattattaaaatttaacaaatgaagacattagaagaattattgcaagaactgggctgcgaaggtagcgcattcgacagtaccggagaatttacaaaagcgggagaaaaggcgtatgaacgcttggagcacttgctgtatgacatagaaagtcttacaggcaaaaaggtgacacccataattgaggaacttgacagaatatgcaacgagaactattaaaattcaagaatatggacattaaagaaagcaaagaataccgcctcgccaaagactgggaaatggcggtaaacagtttcagtttcaaccccgaacggttcgcggcggcaatcccggacatgcacccgacgcttcagcaaagcctgtaccgcctgattaaggcgtgtatcaaggtcatggcggacgaaacacgccgttacgatgaccggaaccgggcatcgcacgaggaagcgaagcatatcatggaatacctcaatgaacacggaaaaaatgtaccattaatataaaaacgacgatatgaaaacaactaagattcaattcaacggcaggtcttattactcccgcatcgtggaatctgtcgatggcgaagaattgcttatcggttcgacaatcctgctcgatgccttgcagcccggcagtttcaatgacgagaacgaaggttttgccagtaaagaagccgaaaggatttatgacgagattttcttctttaccgacgagagaacgcttcagcttcccgaaaacgagttgatagccgaactcaaaaaggataaccccgattggttcgagtaaatcatggaataataatttataaacttagaattatggaaaaagaatatgtaatgcaggtcgcacagaccattaaggaacagttagtagcgttaacccccatgaccgtcctcatgtcgtggggtatcaaagagtttgccgccaccctatacagggatttgccggcactccgcattaaggtgaacggacggctgcacgcagggtacgtcatcgtcgcactcaacggatcggattattacgaggtctatcttgtgaaaggaatggaggtggaatgtgtgaacgaagaggtttgtttcgacgagttgggagacgttatcgaccgggctatcgagagcggcacggacaaagccgagtacgataaattctgcgaacaggagcgacagaatttatatgtaactgttgtcactgtctgattcctctttttaggggatgaaagccgtgcctttcggaaaacgagcagggtacggcttttctatgtataatgcagaaacgaataaaaacctgccgtttataaaacggattacctacgtgttacagtaccttacctcttattgtaaaaaggtttgttttatcttttggccggcagattgtttttcacttcaagatgtcgtttctttatctgtctactgcctttttacttgcagctctatttacgaccagaatgctcgcttcatataaaacccacatcggcaatgtgaccaatgacaacgtgaacacgtccgaagtcggcgtgatgacagccgcaacgataaggataatcactatagcgtgcttccggtaacgtcgcatgaaatcggcggtgagaaaccccaatttggcaaacagccatgataaaatcggaatctcgaacacgatacccattgtcaggcacatcagcacgagggtcgaaatgtaggattgcaagacgatcatgttctccacttcaccgctgacctgataggttccaaggaaacggaatgtcagcgggaaaataagaaagtagctgaccgccacacccatcaggaacattgcatagccgcctccgactatccgcacggcatatttccgctcgcaggcatacagggcaggcgacacgaaccggaacaactggtaaaggatatagggcgacgcgcacaggacacccgcgcataatgccgtcttcatgtggatgacgaactgcccggccagtcccgtgttgatgagctgcacggcaaaactcccggtctcgccgccggcccatgctgcaatccggttgaaaagacggtacgtgatgaagccgtcgtttttcggggcaaggataacggcaaaaagtttttccttaaaacaaaaggcggcgataccgaacacgacggccacggcgacgattttaacaatcgccgtccgcagcacgtccaagtgctcccaaaagttcaagccgtccgttttgtcttcctttgccatgtcactcctctttcttgtcggtattttcgggactgatttctttctccatgccgttcataccttccttgaatgaacggacacctttgccgatgcctttcatcagttcgggtattttgcgtcctccgaagaacagcaggacgactaatgcaatcagcagcacttcctgcataccgatgcctccgataaataatggtatcatatgaaaattgttaaaggttgttcgattaactcaatagtcgttttcagtcatcgttccgccggctattcccgccattttcagaaagttccttcgtccatgactccgccttctcaatccagtcctttctcatgtaaccatctcgacaggtgatcggccacctccacgttgttcaaatcggagaagggaaaatgggtgttgcccttcaaacctatctccggcagatgaatgaccgtgacatcgccgccgtgttcgttgagcaaggcagcccatttgcgcatcagatgcaggcgtcgtgtccattcgtacagttccggccgttcgtcggtttccggcagattgtcgccatagtagatgatgatagggattttcgtgaactgcagaaattcttccatcggcacttccacgccttcggtcttcttcgacagggttagtactttcccttcctccggcatctgcccttcgggaaaaggcacgtttgttcccggctcgtaggcgacgatggcacggatgttccttgtctgcggcagtgtaagccatccgacacctccgccctgcgaatgggtgacgaagacagccggacctatcctgtcgaacagtgcggcatacgccttggcgtagacatccagatcgggagggccgagagttggcgtcatctgacggaaatactggttcagagcctccttgtcgcggctgaactgcacgccctcgaaataatcgggccagatgcccacgcggaaacggttgaaccacgtctcctcgtcgaagacgggggtaacggtcgcgggtgtcgtgctccgccccgcgtttccccggcggggctggtcgacgagataagtctggaaaccgcggcgcaggaaaatattctggaacccctcgcggccgtccggcgtagtttcccatgtcttggaaaactgccccacgccgtgggcgaagacaagcgggtatttccgggcatcgacgggtttctgatagaacacgtaggcgtggtcgccgtgataggtgcgccccagtgaatcggtgagcaccgtgccgcccacggcgaaactgccctgttcctcgatttgcatgatattcccgttgcgtgcgttgcaacccgacagcaaggcggcggccatcatataaaagacaacctttctcatacgcccttcctatttctggattttcgattcctgcaaagcgtcatagcggcttcccacgaccggaattgcggccacggccttttccagctcggtcacttcttccgacgtgaacactatgtcgcaggcccgcaggttctcttcgaggtgcgagagcttggtcgtgccgggaataggaacgataaaaggcctcctgttcagcagccatgccaatgccacctgcgccgtggtaatgcctctcgtccgtccgaaagcgttcagtacctccacgatacgcgtgttggcacggatggcttcgggctggaaacgcggaagcgtctggcggttgtcgttggcggtgtcgaaccgggtgtactcgtttatcatgccgccgaggaaaccacggttcagcgggctgtacggcacgaaaccgatacccagttcctcgcaaagcgccagcacgccgttttcttccaccgcgcggtgcatgaagtgatactcgctctgtatggccgtaaccggacataccttgtgcgcccggcggatggtttcagcattgacctcgcacatgccccagtgcagtatctttccctcccggataagctcgccgcatgtttcggctacgacctcgatgggcgtcgcagggtcgacgcgatgctggtagaatatgccgagcgtctccacgccgagattgcgcagggagttctcgcatacgcgccggatgtttgtcggggtgctgtcctcttcggtcttcacctgcacgccgttcacgaacttgtgcccgaatttggaagagacgaacacgcggtcggtatagcctttcagggcttcgcctaccagtttttcattcttgtggtagccatagctttcagccgtatcgaataaggttacaccccgttctatcgcttcgtgaatcaaccggatgcaggtcttttcatcgggagactggctgcggtgatggttcagccccatgcagccgaagcccatcgccgaaatggtaaaggctgccttgccgctgctcaaggtacgctgtgcgcggactgctgccattcctgctggaatggttgctgccgatactgacgatttacctgtaatggctttttccgcggccgttactttctccaatgccggcgcgatgcagatggccgcgcctgccaatgcggttcgtttcaggaacccgcgacgactgatgccgttctcttgaatctgttcttttttcatgtcgttatctgtttgattatctttctgattgcaaaattagataggggaattaagagcctgtgtatcaatttcacggatagaattaccaatttcaacgggccggtaagaacgatgccggtataccagtaaaattggtatccaaaacgatgatttcggtatatgccgtaccatcgggaatccgtatctttgcttttaattaaaagcagaatgaaaagctatcacagaaaaatagctatatttgcaatgacttaaaaaagaggaaattatgagtgaaataatgaaggttgatacagtccagcagtacaacgactattttggcgtggagaccctgcacccgttggtcagcgttattgaaggcagtaaagggaagcctctccggttcgggaaaaaactgtataacatctatgctattctattgaaagatgcgaactgtggaaatcttaaatatggaaaaagtatatacgattatcagcaggggacgatgcttttcctcgcccccggtcaggtaatgggatctgaagatgacgggcagctgcaccagcccgaaggatgggttgttgcatttcatcccgaatttctgcgaggtacaccattggcgcatataatgaaagattattcatatttttcttacaatgccaacgaagccctgcacctttccaaacaagaaagacggacggttatagaatgtatggaaaaaattcgcattgagctgcagtatcctatcgacaagcacagccgttcgctcatcgtggataacatcaagctgctgcttgattattgcatccgcttctacgaccgtcagttcatcacccgcgacaatgccaatcacgacctgttagcgcgtttcgaggaccttctggatgagtatttcgcctctgatgcccctgcaaggcatggagggatgccgactgtgcaatattgtgcatacaaactttgtctttccccgaattatttcagtgacctgatgaaaaaagaaacgggaatgcctgccctgaaacacatccagcagaaaatgctcgatgtcgctaaagagcgggtattcaatacggcgaagtccataagtgaaatatcctatgaacttggatttccatatccgcaacacttcagccgttggttcaagaaaatggccgggtgtacgcccaatgaatacagaaccgcaaattagctttattttttattttgtgaatgactgaccagtaaaacaccggatatgacaagtatggccgaaaccggttcatcccagctaaaaatgtcctgcccgattaaaatggcaacgacagaagctataataggctgtaggttgatgtaaatgctggcagtggtgggctgtatccccttgagagcgacgggatatagcagattgttgagaacagttgccagcaacaatacgaatacaagctggagtaatggttgccaacagaacgcggactgataaagcggttgcacgtacaattcatttatactgaacggcagcatggacaatgctgcaaataggaacatccatttttgaagtgtgacaggagagtattttatcgccactcttcggatgataatcagataaaatccgagcataactgtattgacgatggcgaaaacaatgccaagtatatgattttcaacggatgcggcaatatccatttgtgaaatcaagacccatgctcctgcaattcccaacagaacacctgtcaacttccgccggttgatagcttcttttaaaaacaatacggaaaagagcataactacgattggatttaaggcgacaataagtgcgaagtgaactggtgtcgtataattaagtccccacgcaaaggaaagataagtacaagcaacaccggaaataccgcccaaagcaatcaccatcaagtctttggcattgaccttttctctcctgaaaacaagcccgatcgtccaaaatatcagcgtggcgaataaaacacgagaggaggcaagcccaatcggtgtcatccactctgccaggagcgatttaccgacaggtacattcaaaccacaaataatttgtgtcgaaagcatggcgatatgtccgttcaaccctttgttcacatggatttatctgtttgatagagagtgcaaagatacgactttattttcataaactcccgtcgaaactgcggtaaaagactgaaaggattttattgttgtttccgtaaaaatggttgtatcaaccgggctgtcctcaaggaaatattcgcagatatactgtccgaaaaacaggttcgggagtttatctccaaaacggaagatgcaggtattatacaaaaaaagggggactggtaaatgtacccgttatataaaaaacacctgatttcccttcttttatgtagggccgcaagaagctgattttgaactataagattttcacaatagataggaaacgccgaaacgtccgcaataatcacggaatcattgcaggcgttttttagttccctcatatcggaatctggctttctatttagtttcccgtttgttcagcacgtcctttatcatttcttttacctccattcccacattcacgaaattccgataaagaatgcgttcctgttcctccctcgacttgaacgtgtggaacttcagtaacggtacatacgccgcttcccccttcttgatttccttcatgtcgaaatccgttttgcagaagaacttcgaggtcttaaactcctccgcttcctgtacgttcattgagccgcctataccggtttttgtttggatgaagtcctgagccgtctggccatatatccaacctatctgcctttgtattgaaaagtacccatatcagcaggattttgctctctattacttaatgatgttgttctatttttgcagcctgtaaatcaacgatatgtaataaatggattatatcgacaaaatatttaagacagtatcaattaaggatagccgacggattattgaactttattttcaggagctgtattgttttgcgccactttccaacaaagccctctctcaaaaattactcttgccggtacctatcgtgaccgccataaagaacgaaggtatcaggctgggcatattggaacaatgcagcggaggcgtagggcttactcataacggaaaggagtatgtggaacaagctcttggattcaaggggattgacctctgcctgtatcgccgactggcggaaagcgaacaggcaagggacgcatacgctgacgcgctgagtaaaaaataccgtgcggcattcgacgaacgccccgtagcggatgtagcactggaccaagcccaatgtaccgtacagacagcattccgcagggctttgctctgcttggcaaacggcacattgacaggcagacaaatcgtatgcatgggcgatgatgattttgtcagccttgccatcgggtttctgctgaaagaactttatcccggtccaagcatctgcccgacacacatccatgtacttgagatggacggtcgttatatcgagtgtctggagcggctggccggacggttcgccctgccgataagttgtgaacgggtggatttgaggatgcctctgcctccgcatttgtgcgggcgtttcgactgcctgttcaccgatccgccttatacgcaagagggagcttccttgttcctgtcacgtgccattagcgtactgaaagaagagtccggattgagaatctttttctcgttcgggaacaagtcggcaacggaggtttactttctgcaaaaatgtttccaactgcacggactggccatcaaagagatgttcacccggttcaatgaatacatgggcgcatctcttttgggcaacaaaggacagctctttgtcctggaaacgacagaacgtacacgcgccttgtttcctctcgaaaaacgagggcgcgatgacatctacaccgcagaccgcaatctccggcaaaaccgttaccgctgccggcaatgcggcaaagtctatgccgtggggaaagaggcggaatatcagaccatcagggagttgaaaaaacaaggctgcaatgtatgcggagctacggttttcgacagactgcacaaaaacgggaatacggataaaaagcaataccttcccttagggcatcacatccttgcagacttctacaactgcgacccggaaaaactggacgatgtggaacagattcgcacattcatgcacgaagcggcagtaagtgccggagcgaccatagtacaggaaaactttcacaaatacgccccagtgggtgtgagcggtgtggtggtcatccaagaatcccacttgaccatacacacgtggccggagtgtggttatgccgctgtcgatttgttcacatgcggcaccaatgtccgtccgtggactgctttcgactatttgcaggagcggctcggatgtgcgaaagtggaatacagcgatttgatgcggggagcctatgagcggccaagcctgttgcggtattcggaaacggaacagcctgccgtgcggcggaaaaagcggcaaaggtacgacgcgtcttcgaaatggaacagacgggccaggtctttgacggactgttctgtgttgtccaaatagcgtttgagttccgttacgacaaacaggtcaatgatttccttcggagtccgctgttctattttgcaggttatcttataaaggtaatcggtcgtgatgcaaagcctgtccgcataatatcgtacatctctttttacatggaaattcttagccagcagtgacatgaacttgccgaacagcacccttgactgatccttttgataacacttgcccaagtcgggaaacatcggcttgaacacaatatctaaagccagaaaaacattgtaaatgcaattttgcaggatgtttttccggctttcttcatcaccgttctccatcgcccatatcatctgcttgaacactccgtctgccaatgagtattgtgcttccgaaagtcggcagaccggatattcatacagtccgtcccaaaatgcgggggaagtcattttgtagaaaatctcccctgtcagttccaatgacaaggatatatattctgccgtgaatgaaggagaaacacacagcggtgcaaataaggtgtccgaaaacaacacaagcaaatcacctttgcggaatgtccgttttcgtgtattggtggttacgacagcccggccttcaacgcataacagcatggtacacccgtttgccacgaaaggcagtttacctgacaagtcacgcaggcttgttcttccgtgtttgtattgttcgccatgcgagagagcaaaactttgtatgccggacgttatcataacaatttcctttccatcgttacatgggttggctcgaagcaatgctttttatacaaagagcgcatcggtacgttcccggcatgaaccttgccgacaatataagccgccttgcactctctcgcatattctatgcttttttcaaacaggtcgtctacaatttgcattcctcgaatgcactcatccgcataaatggacttgaagttggcataaacctctccggtcaggctgttctgctttttctccatccatacccagcccacaattttaccggattccgtgtcttctatcacgatcattccgcgtcggtcttttgctttggctaatttcttgcagtggaactcgaggtcagtaatagccttttctccgaatgagatttcagaaatttcaatttcaaattttgccaccgcttcaaagtcttcctcttttatttctcgcatattgtacatgattccaaatattgtttttccgttaacaccaatctgtccggcatgatgcccataaaaacttatcccttcttcggaaataagaaggtctgtagcttttccaatcccgccttgtgcttttgaggattgctctttttcagcttggcaatgttctgtaatttccattttacggacggatagcggcttaaatctccggcacagcatttttcccaatcgggttcgccgttttcaaatgacagaagaaattcccggtctgtttcggtcaggctgtcgtttacctgctgaatgaggttatgccttgcctcttcataatccgaataagtgaatggagtatcggacattccctcaaactgcttttccagtgcttccgtctggtcgatggcgttcggctgcaaagattcgatgacaggcttgtcgctccccaacaggcaaagcatgaagccgttcttgacatcatgaaacgacgccatttccatatacttgcaatcgaacaggtcccgtgggtgttggcggcttaatgccgctgcaattttgcccccgtaaagctgcgaataagaaactgtacgtgctttacaggtcatattgaactccgtttcagcccgttcgcacagtttcctgtcctctgtctctccgatgataccccgctttgtcccgttcacttcgattttgacggtcgcaccgtccaaagtacattgtaatttccagacatcatgcttgtggatcacttttatgcccggtatggatttttctatgtagcttttcaaagttcgcagatggttgttgattgcgtccagactctcggccctttcctttacgggaatataggtgaggtctatatcgactgaatagcgaggcatgtttttatgaaacaggttgatagccgtacctccatgcacagcaaaatctttgatgcggtacacggacggcataatgcgtatcaacaatgccacctgttttttatagatgtcattcatattcgttcagttctttaggtacggttattttgtatttggagatataaatcccgttttttgacagttgcaatttggaggttcccagtcctattttggatgtatcaagtgcctcgaaccaatagtgtcccgctttttctgccatataaaggaacatacgctttactttaaggttcttggtcgtttcgagcagttgctgtagcatttcgggacgcagcgttgtcagttgttccatcatatagaacaagtccatataggaatattgttgcggtgcaagcaacagacattccaagaatgcctgttcaggtgtagaaaccagcagatccacttcgtatttcacaatcgttgcggtctgcggttctgaaaaggtatcggtggaaaacggttttatcaccctgtcgaaaacatcgtggcgtatccattccggaacacgctgtttgccgtgtgccaccatcagcaacggtttccccataggcacatagtggttgaagccgaacagttccaatgcagaatgagctgcgacacggaacgtcttgcccaattgcctgttgtagcaggacaatgcggcgtatgccgacaggctgtctcccgttcggtacatgactccctttgacagcatctcaagccagccggattcccggtatctttttatcaactggtcggaataaccgttccttttcagccattcggagaataacaatcctttgggagtggcggaaagcagcagttggtttattttgcttttttgttctatatccacagtatatgatttgttttctttttcaactgcaaaggtagcattattttccgttccaaaggtcttgaaagttgattttgtttcggtataatatactttttgtgtagtattgaataccaaaaccaactccacaggattttccaagataccggaaacgccaaaacgcctgcaataatcgcggaatcattgcaggcattttttttactttccctcatatcggaaacaggtttcttatttcgcccctcgtttgttctgcacgtcctttatcatttctttcacctccattcccacattcacaaaattccggtaaagaatgcgttcccgttcctctctcgacttgaacgtgtagaacttcggcagcggtacatacgccgcttcctccttcttgatttccttcatgtcgaaatccgtcttgcagaagaacttcgaggtcttgaactcctccgcttcctgcacgttcatcgagccgcctatgccggtttttgtttggatgaagtcccgtgccgtctggccgcagatccagcccgtcggcatatccgagattttcgaggcgggtacgaggctgtccatattttcgttcagattgatggaagtcttgtcccggtctatcgtgacacccttcttgatttgcaccaccttgccgaagatgtcgctcgacaaccattccagcgtttccttggcacgggccgaaccgctcaccacgttacccaccgtcgtgatgattttctgcatacccactttcccgtaatccgcttcgagctgcggcagttcttggaagccgagcgtcacgctcaccttgttgcttcgtgccgtgccgatcaggcggtctatcttgtggaagtacagcgtcggcagctcgtccacgataatgctcacggggacatttttgccctgtcccgtattcacacgggtaacgaggcggttcaggataagggcgttcaacgctccgataatgctttccatttccggatcgttcgctatcagcaggtagctcggattcttcgggtcgctcactttcaggtcgaagtcatcaccgtcacggtggaatatccagtaactctctttggtcgccagacgagaggtatagacgcgcaatgtaccgatcataccttccaactgttccatcgcgcgatttttcaaagcggtctggaacggaccgagcagcggggcaacctcgttgtcggtctccagtacctcgaagatggtctggtaactctcgttcaggaacgacaggatatgcggcatatccgaatacttgcctaaccagtaggcaggttcaacgatttccccgccctctttggcgcgtaccacacccgtcggtttccagaatttcgtctccgggtcctgccgtttttcagcgtacaatttgtttcctttggcatcgtaaggctcgcgttcatagttcacgaaaaagtagatgcaggcggcgaggaagttcacagccgaagtctggaaaaactggtcgctgccgccgcctccctctttcttgcctttttgcagggattccagcagcgtttccgccgtttcgctcgccgcagcgaggttgttgatgtattttgcctgaattggatttacccggcggctgtactccacgtccacgaagttaatcatattgaattggcagccttggggcaactttccgagcttctggtttttcttgtagtggtagtacagtttcgtggccagcgtcgggaacttgtagtcatagaccaccatcgcgaaccccttggccgagtgctgtcggataaacggctcgatgatactgaatgtcttgcccgaccccggtgttccgactacccatgttccacgaaaacagttggttatattggtccagcctttacggaacttgcccttgtagtaatatcgcatggggatattcacgctgtacggagtctctatcagttcctcgcattgctcgaaactttcattctcgaaattgaaacgatccttcatcagtccctctttgaggaacttggagatgttatccagtgcgacatgcacgaggataacccccgtgagcgataccgccatatagagaataatgttcagcggcagcgtgtagaaccgcgtctccatcggatgaccgaacagccatacggacagcactaacagggcaaagccgctcacgagcgggtacaagacctgccgccgggcgttgaattccaaatgtttcttggctctggtgccgatacaggtaatgcagatcagcagcaccgtggcgaccttgctgtacacgaggttgccgtcgttatagatggcccaccgtttgatacgtccgtgaatgtcgcagagtatgccgccccagtggtccagcatggccgggtcgatggcatactcgaaaaactccatcagtacggagacatacaccaccgcacggaatatccggtaaaatccctgtaattccttgctctcttccattgctatgtcaattctttttaataccccagaggacgtggatgtgaggccattgcatacggttatcagcggaaagctggcagacatgggaaactgcatatagaggtttaagcccgtcatatattgcagaagcccgtacttccgctgtaaacttctcaaggaaaatccggacggcattgtcagagccataagtcatgaaatcaatgaaatcttcaatcaattcttcattgacatagcagagctgaccttggaaaatatcatggtaacggctgatacggccgttccattctgcccggatttcttccctgcgattctttacggagggaaacctcttgtagcagtctattccatcgtcgaggaatatgaaattaccggaaacgtcctcttgtttaggacatttgcatcttaacagatacccgaagaatcctttgtccggatgtactatatccacatactgtggtgcttgaaaatctttaattccgttcataatcataaattcagttgttgatggttataatgggacgcactttatgcgcctgtgtcttgggcgtttcctgcatggttccgctggctgtcgagtagagccatgctttgactgtctgctgtccttccacctccgtcgatgtccaataccagcactcgtcggcctcggtcggcagcgggtcgccgccgcatttctcgataatcggattgatgacggtctgtgccgaatacagcagacgcatctgtgccaccgaggggatataggcgctctgtccgtatttccacaaggcaaaaacggcttcagccatcggcgaggccgtttcttccgtatcgtacagggcgaacgtgttctcattcccgtcgtatgcagcaatgtccgccgacgtaccctgctcgacaccgaggctgtcggcaaaagccttcggcgtcatgtcccacagatagacggcatagccgtttccttccgtttccccgtccgaataggtatggaagacgacggcaatcgcctgtttcccggaattttcatactcgctgtacggcacggccttgccgtccacgcagaggacatgtccgggacgtaccgtcttgtcgggttcttctatatgtgcgtcgcaggcagccaatgccccggttatgaggagaaccggcactacctggcacgtttttctgatagtgttctgtttcatctttcccttattttataggtagtttaataccgagggcaactcctgtacgcagcacatcggccccctttatcatcacgtctcccttgacttgccagtatagcgtccagcccgcccgcaacacatagttgtgctcgtagccgaaatgcagcccgacaaggaacttcctcgtatcgcttccgcccgaagccccgatacggaggcttccgtaatggttgcgtcccctcgtgacgcagggtttgtaagccacgccgaagccgtaggtacggtaattctgccagaaagatttcgggcatacatgcttgcaggattcgcactctgcccattgcaggtagccgttggcaaagaactcccacgcatggcggtagttcatctcgtgttcgtaggccagcgtcacgtccagctcgttcttgtacagcagccccgctccgagcgaaaggcggccgctgccccgttgtgcattcgcgccgacggcgaggcacatgcaggcaatcgtcaggataatcgtctttctcattgtcattcctcctccagcaatgccgtgctgaacgaatcggccgacagcacgtcctcatagtcgatattcaggctgatagcacgcccgctgatttgtttctccgtcatctcgatggtcagtaccttgtcgttcgggaacgtcattttcctgaccacgaccacattccggtagccgtgccggaacgtcttgcccgtctccagcaccagttccgggaccagttcgatgacttgcacattagtcgctttggtcagtttcttgtccgccagcttcacccgtatctcgtcaatgtcgaaacgtatgttcgtccggttctctattgagaagtcgatgaagaaatactctcccacggtgtagatgttgttcaaccgcatggtcatgcggtgtgccttggtggcgacgttgcggatcttcgcgggcgagttccagatacgccgggcgaagcgtgtcatctccacggtggacatcgagaccgccgggttgtggtaggcgtttcgttcctgcaactggatttccttgtcagttaccgcctcccgcacccgtgtggtgtagagcagtgcatactgcgtgcggtagcgttccgttacgatggtcactatggccagcacctcgccgtcctcgtgtccgccctctttcggtttcaggcggacgatgttatctatcggctggtcaccgacaaccttatcggtggagatgtccacgaagcgtaccggttccgaggccgtgatgaccgtcgttacctgttcatttaccgtaagttgttccatctcctcgtaggttcgttgtgcctgtacattcggcgttcccagcagtcctgccgccagaagaaatgccgttacgattccttttttgtccatgtcattgatttattgattttgtttttcttcccttatctctttttcctcttgtgctttgttcctgcattccagttcctcctgaatccgccgttcggcaatctcgcagtacacctgttcgatttcaaatccgatgtagtgtcgtcccgtgcggatagcggccacggcggttgtgcctgacccgatacagttgtccagtacaacatcgccttcgtcggtgtaggtccgtatcaggtactccatcaacgccacgggcttttgtgtcgggtggtagaacgcgcctttcttgtgttccttcggcatgaagatgaccgaggtcggatatttgtcatcggctatgcgtaccggtgagagtttcatcgttccgtaacaacggttggtaaatccctccgttttacgcctcccgtgatttctccgttccggaggacacggtgtcatctgcggatgatagaccggctgttttttatagaataccagaatatcctcgtgctgccggagcggcatacgtttggcattgagatgtcccgtcacccgatctttctgccacacgaggttgtaccgccatagccggggttgcgacagcatgagccatgcggagaaaagcccctgtccgaacaggataatggggctgtccggcttggtaatccgccggtattgctcccacaaggctgcgaacggtatctggcggtcccagttcaccgacggattgctgcgatttaacaccccgtaaggcaggtcggcgattatggcgtccacgctactatccgctatctgtttcatgccctccatgcagtccataaggtaaatgcgatccgtctctatcatattgcgtctgttttcagttctacaatttgtcgggcgctcatccaggtacagcgttccgtccgggttttccggatttcacactcccagagggtattcttctccacatgtttgaaattgaccgcaccgtctctcggcccgtaaaaaccggtatgcttctggaaggcgaataaggcaatcctccgcccgtcttctgcctgaaagttgcatatcagggcgaatcgtacccctttgtgccaccattcggtacttacgagcttcccaacgaatgtttcgggcttatcgggagcgatgtagtcctcgtaatagaagccgtccgttcccttatgaagttttgatatgtctgattccattgtcactgcccttttagttcctgttttcccgtccgttcaccagatacacaaacgtcccgtatttcagcttcaccttgtttttcttgatagccttgctgatggcgttactcgttttctggtaggcattgttcaccgcctgcataccccattgggcgaggctgttaccgtatccgctggtattcatgttcatgctgcccgacatggcactgctcgccacatccttgcttgtctcgcggaactggctgatgggtacgtaaagtccttccagcccgtccgtatcgtagattgacaagctgaccttgaccagttcgtcctccaccaatatgctgttgatgcttccttttacacgtccggaagagaaaccgctgactgtggcatacaggtaagtaccacgcctgaccacgctctcgttgatttcgatgtcgtccagcaggcgcagccgcacacgcgagccgtccacggccttgatgttctcgtcgatgatcgccttgatgagtttcggttcccgagcgtctttcgccagtgtgttgaagtagtccgaagccgtctttaccttcttcaccacctcgcttgccttgtccgtctccgcaggagctttgaccgaacggctttcctcgtcgatggttcccttggcctgcgtcatcgtgtccggcggagccgccgttgcggtgctgtccgtttcggacggcatgacctcccgttgtcctctcaacctcgcttcggcgagtgctttttccagttctgcgagagcttcctgctcccgcctcttggcatcggccgcttccgctgccagatcattttccttttcctgccggtcaagcagggcgatgtcctcttcggtgtactgcgattcatattcctcttggttattgtccggttcgtcccgctcgatgttgtccacagcggaataatcttgtatcttgccccatgatttggccatgttctcatacttgctgccgataccgtcgccacccttgatttgggcgtccggcaattcgggattcaggaactcggtcgtctggagtgtcttatcctgtacctcgaccttctcggtatggaacaggtcgaaaaagaagtacgacgtgccgagaaggggaatatagaggatagccggaagcatatactttggctgcctgaaattaattctcttgaagatattgttcattgtttccctttaattgagttgcacatacttgcttatagttctctcaaacggcatattcataagcctgccgttctattccggcctttccgtaccactttccttcgtatcgaatcttcgtacatgcggtacggaaagcatcttatgccgttcccggagcacggaatcctgcatctccgtggccgtccggcgggtcggatgatggcggtacaccaccgtcaggcggtaaatattccatgtcagcccgcagatggcgaagccaaatacgatgacgagaaacagcgtccggtgggcgttggcgaaaccctgtactttggccactgccttgtcgatacgtgtcgctttggcgaagcgtcgcccggcatccacgtcgcgttcgtagcgctccttgtatttcgggtcgttcttgtccggcatcttctcgccgaacagcatacgtctgaatcctttgatattcataggactggtagagttaatagttgctttttgtcttttgctcgatgtccttgttcagcagcgtgcgccagttcacaatgagcagcccgtgcgggttgttctccgtccggggtacacgcttgagctgtcccgccgtaaccagttcgcgcatcaggatattgctgcgccgttcgatacgctgccgcccgtagtaagtgaactccatcttctccttgttgaaggtgatactgtcgcagaaaatcgaaaagacggcactcgttcccaagatgttggaatagaaacctttctccttgagcgtattgtactgtgccaagcccgtttcgtccactaagtacatcgctttctccatcgtgtagcggatgtacttgtcgtcgggagcaagggtaaagaagtagtggtggaacatctcgacatggctcttggcttccacgtcaagcgtttcctccatcgtcgtgcggcgtaccagtataggcacgttgctgtccagcacatacaccttcttttgagcgtccgtaaccatcatgcgggccgtccagatactcgacacgctgatgatgacgcaccccacgagaaaggcggtgcagataattccgaccagtttgattttgttctctaaattcttgatgaccattttgtttgaatatttatcgttactttgttatctcattaccgtacccattgcgcccgtcgccgtcattttggcctgctgtgccacgccctcgccgaagtttcgggttgagaacgccgtgtcaccctccggtatcatccatgccgcaaggtcggggacgaggttcaggcattttagggccacgatgcttgccgccatcagatagcccgccgagaagaaggagttttgcaggtaagccgccatcgtctgctcgcttgccgttatcgccgttaggttctctacctgtatgcaaagtacgatgtcgaacagcagcagcacgtagaagcccacgaagtagagcatcgcaccatagaaatgcaccgtcagataccttgtgagccacttcgcccatgcgccttcccacttgggtaggagcgagaacgcccattggataggtccgaaaatggtgagcattcccaaaagaatttgctgacaatagatggtcgcccaccaaccgattctgaatactacaagggctatcagcatgatgattttgtcaatccccacgattacccccgaagtcagcgaggtgaaccacagcttcgccgcatccttctccatgttcgttacctcgtccacacctgtctgttccatcgttgcctcgataaggtttgggtccgacgtacccgtatgggcgacatcggcctgtgcctgcagggcagtgtacatcgtgtcgcgcacgtaaatcaactcctgcacttcctcgaacttgtccgagatttgcgaggcttcggcctcgtacaggtcatgtgtgtacgaaccgacgcagttcgggatataggagaggaaatctaaaaagcaccagttgctcccgctgtttgccatgcccgtgtctgccggaggataccaccagcagaggataagcgacacggccagcggtctgaagagcttcatcacgtccaaaggctcgtgcttgaccatcattttgtacgccatgcctgccgccatgatgatggcgaatagggcggccagtgccatgcacatttgaagaatccaccagaagggaccttgcgagccggtaaaggtcgcatcggtcagaaactcgttggtctgaaaaatcacgtcgtcgatttcctcttccaagaggtcgataccgaaatccgaaagaatatttccgtctgccatacgttgtgtgtttttagttctttctgtttaccgtctcgtctccgtctcccgtatcagtttcgccgcccgattgcgcccctcgcacggcggaacgcgattcgttccaccggcccatcgcctcgcggacgataccgcccttgtccagtctccggtcggcggttgcattcagcagcccgttcgcaaccgtggcgttctgtcttcgggcaaggtagccgaccagaatctcgttctgccgtaccacgtcctcgtagattcgcaggtactctttcttccgttgtgcgttgggcatgtaggcgtccttcgtagcgtcaatggcgcactggtagacgtggtagtattccgtccaccgctccctgtcgtccgttgtgcccccggcaagggggatgcggtcgatgttgcgctgaagccgttccatttgagcgtttatcttatcgccctcggccagccacgcgaggtcaatctgccggtcggctacattcagtgcctcgatttcggcccgcttgaccagtgccgagtcgatggcttccgcctcgtctgtctggttgtacaggttcacacccgccagcgtgcggaacgacagtttgttcttgcttgccgccgacttcttgtacttgttgtgcagcagcgtgtaataaagttcgggcgacagagcgcccgtaccggtttccataaccgtaatctggttctgtttcggcgagtcatggttgtaagtaaccgactgcgccttgacaccgctcgttgcaactgctgcaaccgccatgagtaagagagttctgttcatattaatttccggttattcattattttacagttatttatatcgtatagtcatactttttttgagcttcctttactgtcataaatattggtattcattcctgactcgtttctctccttgcgagaaatatgtctcgtctttttcaatgcaaatacattttctattcgtatagatacaggcaattgcggtgctcatgctccccgaagcaaaatcaaggacagtatctccttcctttgtgtatgtttttatcagatactccaataatgcaatcggcttttggttgacatgaatcgttttgccttccgattccgctgttttgaagtatatcacacttcgtggatatcttgtccctttgttttcatgcctgaatgtaggattgggtacattgtttatccctgtccaattgcttcctctcttcgtgcggttcccgtaaggctcgccttcctccatgattggataataaggggttctgcctttgccaaagacacttattagctcatgtgcttttagaggttgttttttagcgagaagaaaattgcttgcttttgacttttcccaaacccagtcatatttaaattcatctaaattgccgcagcgtagaaagctgctgaacggttcgctgccaaataagaccgtaggtgcattttctttcctgactctcctgatctctttccacatttccgggaatggtattattttatcccactgtgaagctgtaattccaaaagggggatcgcataaaaccaaatcaatgcttgattccggaagaaaaggcatcacttcaagacaatcggccttatataacgtaatgtcttttgcaaaaacaatcttttccattgcatcaatctgaatgtctttttatcccttggtataatcccaataggcttgtttgtactaaaaattctttctctgtttttatttcccgatgtcgatggcatggaagtcaaactctaacctgtagatagtttgccttctttcccttttatcgttcgttaataatccagccgtcccgctttgcgccatcgtccgaaagccccgtcgataatctccttgaccttgggacggtaaatcttcgctttccagtaaccgatgcgcacctgtatgtaccgccacgtctcgatatacgcccggttcaggtgccgctcgatgtcgtccagcgacgtgttcaccgcttccagcaccatcagcaggtcggaggtcgaacattctgccgcccctgtggcatacagcacgaggtcactgaccgatttgtaaagctgtttcccgtcatcggcgatgtcccgtattgccttttcgttgatggccagtatcacggcatcgccggggtcgatgcgcccccgtttcacgattctatcgttgaagtcctccagcagtctcttgtaatcgccgatacggtcgctgaccgccgtataggtgcttttcacgttcagcaccgtccgcaaggactggtacatcacgtcgatgacgtcgaaggcacgggtgtagcggtccaagtccacattcagttccttgtactcgccgacctctttgcggctgtactcgtgcagcagcttgttgctgtattccagcgtactgcgggccagcagcaggctgcgttgcttcttgtggtcgttgatgtaggcttctaccgacacgatgtcgaacgtccattgcgccttggcaatgccgggcaggagagccagcagcacgactgccatcagcagggcacgtttcatggccgcacctcctttccgctgcctttgccgttcctgccgtttccgctccgcaggttccgcgcattctccacccagcgttcgtggcattcctccacgagcgtcagcctgcgtccctcgtccatatccaattcgggcagcacgtccttcagcacgtcgatgatgctccgtttgtagtgcatcatcttctccagtgacacgaggtcggcatatatcatcgtaatccgggaatccacttcccgtgcgatttcgagccggtcgcttgaccacagcagatggtacacctccccggtcggagtctcttccaatggtggggtacgggcatattccgtcgtgatcttgcacgaaggatgctctcgtgcaatctccgcaatacggtcgttcaccagtttcgttttctccgcgtccgacaggttagggtcgagcgtcagcacgtcggccacatacgtgtcggtgtattccgtggtcagttcccaactgatctgcacgatggcacggtgtatcttgataccgaggaaatatttcggtttgcgggctatcgagaccgtcgccttgaacgtgatgaccccgttgatgttcggcatggtcgccttacggacataggtgtagccgttccacgccccgccgtcctgccacgacaggctgtaagccgtcttgcagtcctgcatgatggccggtatgcggtaatagtcgtctgttgccacatcgttatcgcccgacgcctcggttttcgcgtcggtgtattcccgttgtttcttctgccattcggacagctcgcttttcaggcggtctatctgtgtcttgttcgcgttgtactgctgccggtacaccgccgcatcttccacgcttgcctcggcgatttttttcagcaggtcggcattctcgctctccaacgcgttgatttgcgactggatggcggctacctgattctctgcctcctgcagcatggcgtccagctcggacaagtccagttcgttctccgtaaccgtggtctgcatggcacactcctttgaatgggcgttcagggatttgccgcacgttcggcacttgtactgcgtcgtgccctgaccgagcgtagccccgtccgaacaggttacactgatggtcacgctctcgcagccttgcaatttcgcggcgtccgtcgcctgataatagttccgcgcgtcagaagctatataataggtataaccttcctcgttgtcgttgaactccgagagtcgggcgttaagcccggctttgaacgtgttcaggtccatcgagtaggaatcgaacacctcttcatagacgacctcttcccggttccagcttttcttcacatggatttcgtaggcgtatgccttcttcgtctgtttgccgccccggctgatgatatagccgttctgccagtagttgatactataggtatagccgtcattctggttgttgagctgctgtacccggcttctcgaccaaccggcgtaccgttccgaattggcgagcgcctgctcccgttgcgaggcattgggataaaagtcgggatcggttgtctcgaaacgcgtccattcgccgccgttcagtatgctgttatcgtccgtcggcgggtagtagtcgcacaaggcgatactcccttgctcacgccgggcgatataccaccgttgcgtgtagtagtttcccgccgtctcgtccagatagtccgtcatccaggaggtaaggtcgtagttgctgaaatcgaacagtcccgccacgttgtcctcaccgcccaccatgtcaatcagcaggccgccgaggtcatgctccgcctgctcgaagagcgcaccgtaatggtcatacaggtcgatgaccttgctgaccctgccgcccatcagctcatggaacgaactggtttgcaacagggcgtcaccaatgttcccgatacctgccgaggcgagaccgacacccatgttgtagaggttgtcgatgtcgtgttgcaggttctccttggtgaaattgcccggcacgctggcgatgtcgtccagcatgtgctgccagtcgatgtcgcctatctccgagagtttcaacagaggggcgatgttccggttgatttccagaaacacgatgtccgaaaagcccaacgtgctgttcgtcactacactctcgaactgcatacacaggcttttcgtttcgtcgcagattttcatcaggtagctgccccagtagatagccgtttgcggtgagcggagcatcagtttcgccaccacccatatcttgggtatgatcttctccgagaccatgcggtaaatgcggcggtagtagtagttctccgtactgctgttccagataccgaggtcggaaaaggctttatgctccaagaacttggaggcaaaaatccccgccgtggccacttccgccgcattgtagtgcttgagtatgtcatcgacctgctcccggtaatagctttccgccacggcttccgtaccgaaagcggtagccattgccgccacggtacgcgcatcgtagttcacgctgtaatactgcgcgtggatgtgctgtacgacaacgagcgacaggagcataaggataagtgacagccgtttcatcatggattcctccccggttaaaaacagcccccgtcaacggcgcgtcatgcctcttagtgcacgtatcagttcgtcggcctcatatacggcggaatttgccaccagacggtggtgtatgaatacctccttggctatctcgtacctgcgttgttcccacttcgcctcttcttcctcgtcctgcacggaatttccgataccggcgtattcgtccagttccttaccgggcattcccaaccggagattgtacctttccagaacatcctctatttcctcgatgctttttcttcccatgtcgcgtacccttaccaagtcctttccgggccattggcacaaatcccggatggttttgatgtcgaactcacggaatatccgttggatacgggcttcatatttgctcccgaactcaagtgtcttcacgctttggctgatgtctatcttttccattttctgtaattgatgatttgattgttattgttttacatgaaggttcaatatccgcccggcctcgttgaccttttgggcgaacggcagggattttccgataccgctggcgttccaatcccgacagtacgcctcgatagcttcctgatggctgcaccgcaattcccgcttgtagagtttcagggcttctttctccgcccgctcggtggtgtaggtcatgtaacactctcttggttcttccacgccgtacacgccgctggtcgtcccccggcggatgaacacctctcggaagaagctgcgcccttccttgttttccagccggttgatggtgaatatctttttgcagtccacgtcggtaagtccgagaatagccttgatttcatcgaaccgctcgcggaacttgctctggtcaagcagcatcaccacgtcggagttgttgatgatggcttccttgacgatagggctgccgatgatgtcctgtatctcctgcgtcaccacgccgaccgaggcccagaacttacgggccgtcttgtacataaacttgatgtattcggccatgagcgggctggcaatggccttccacgcttcctctatgaccaggactttgcggttcttcttgatacgcatcttctgtaagaatacatccatgataatcagtgtgacaagagggaacaggagaggatcatcctttatactgtcaatttcgaagacgatgaacgtctcatcgaacaatgaactgtccatgttctcgttcagcgtcttttcatgattgccgccccgatagaagtccttcatcatgtaacggtacgtcgatatgtcgatgcccgaaatatggttttcggcacagatgtcggggatgcgctgcacggaaaattcatagaacgagttgaacgacagctcttccactttcaactccttacggcggcgttccatctcgtcgatcatgcgctcgatacgcccggtccgctctccttcgtcctcgtcctgcttctcggcatggttacggtcgtcgatgagcagccccttacgcaaatcctcccgttgcaggggtgtgaagccgtcgaacccattgaaataagtgtcgtaatactccgtgatgacctgttctatcaggcggtcctctgtctttgtgaccgtaccctgcgagcctttccagatgagcagcacgaggtttttcaggaagcccgtcttctccacattcatttccgcccgattgatgcggaatgggttcatcgtaatcggtctttcctcggtataggaaatgtacttgccgccgaggtattcgcaaagtccctcgtagctgttacccgtatcgaccatcaccacgtccgttccttgctcgtacaactggcgcacgacagagttcatgtggaagctcttgccgctgcccgaaggaccgagacagaaaaagttcgagttgtccgtcagcttgtttttcccctcctttcccgtgatgtcgatagccaccggcacgccttggcggtctgtgtagtagattttcagcggtgtctcctcgctgtgctgtatgtgctccttatacatcagacacatcgccgcgtcacccagcgtcaggaagcggtcatagtcctcgttcatgccgtaacagttacccggaaacgagttcacgaacagttccagttggttgtacgcccttttggaaatatggatacccatacgtccgaaagcattctccaagtggttcgtgcatttttgcaggtccgtatcggccggtacggcgacgatcaggttgaaatgggtgtacacgagctgcttgctttcccgcgcgatgacctcctgcacccgcttgatgtcctccacggccatctggttgctcggattgggaatactggcgtgccggttcttctttttgtccagcagggccagttcccttttctggttgggcaggaagacaatctggttatagacgaccgtctccgcattcggaatgttgtcgatggcagccagcaggtccacgggcatatccgtgttattgacctctatattggtgtaaggccgtatcagtgagggcagtgcggcacagtccacatcgacaaggctatataccttgcagcgtttgtcgcccatcgagaccgtttcgtcgtccgccttgaagttggtcatcgacacgatccgctccttgaagttcatggcgaaatagcggtccacgtattcgctcgcttcggctttgttcaggaacctggcctgtaccccggcatcgtgcagctggtcatgcactttgcgtatcttgaccagaaagtcgcgccacttcttgttgtcgaacgagaacaggcggctcttcttcgcctcctgcgtgatggtcaggtaacacacgctgtccgtatagttacgccccttgaagtaacggaagtaggccgatgagaggaactcgtgtttgtcccccgtctcgttctcgaactgtttccggatgaagatgtcctgtttgtgcagggcatatccttcgccgagcgtctgcgcgagggcggtgaaaaggtgcgtgaactcgtagtagctgtcgatgttcgcacagtatttctgcacgggattctctattttcaggatggctgaatattcgcccgtcttggtgtacagcacgcccacgccgttcgtatcttccacagaaaaatagatgtcctgaaagatacgcttacgcttgcctccggtaccgaacgcatagaccgacagggccatgccggcacacaaggcgataaaaagtagaatgatgtacaaggtcatttcaaaatacaataaaaaaggccggtccacccggatttcaggcggccggcccgcgttcaacattcaacaagaccacacgttgcccgtgatggtttttcttttcttctcacagtttcttcgagtgggcgtagatatacactccgcgaccgtctttcttggtatgcagccctttccgctgtttgagcatgataagcgcaatacccgtcgagacgaccgcaaccagcacgaccagtccggccacgaaacccacgaggcagtaggcgatgataaatccgacgatggctccgccggcaacgcccgccgcccagtagatgtagcgtccctgaatacccatgaactccaaaggccgttgcaggcccttgaacagcgggtagtcgggatagcgttcgtccttgcctttcatcgtgcgggagggttatgcgccgataccgaagaacatcggaagtgcttgtgcggcagcgattaagaaaatacatgcgccaacgatcatcataatctttttcttcacgtcctgttcctcgttgttcatggcgatgtacaccgagatagcgcctacgatagccactacaccggcaatggcgtaacacagtttgaccatgacggggacgtacttggcgatttcctccgtcacggtcgccagtgcggtcgtaccggcggagtaatcgcctgcggagttttgggccatgacggccgtcgtgccacacagcaacatcagtgtgagcatctgtacctttttagcagaaaacattcttttcatttgtctttttgttttttgaaacatgattatttattttagggtaagtattgcagttctttcgaatcgttatggcggcacctcattcctgcatcccgtttctatatgcgatagccgaaaaaggcaggaaagacaaggaaggcaccgatcaggaacaggcacgcgcccacaagcgttacgacggacttggtaataccgtcctcgcccgtgttcatctttacgtaaatctggaatccggacacaatcacacaaatcccggcgatggcacaacagagagcttggacgtagaacatcatcgttaccacgtagtcgtgcatcgtcgccagcgcatccgccccccaactgtaattcacgctgccgcttttcgccagagccgaacaggggatgatggaacaaagcgcacatagtatcttcttcgttttcgacatcttacagcttatctttgaccggtctccatttcaggctgggacggttgtccaagcgtcctttggaaatcattgccttatacatctcttcgtcggtaaagccgtcggacaggtagggtgcgaccttttccatctgtgcctctgccttggctttcagccgttcgagccgatccttggctgttccatcttttttcccggtgtcgccgttttgggcggcaggcgaagcggcaggtacagtctccgtgccgtatgtttcatttccgattttgaacccggtctcgttctccgaaacctcgacactctcttccgtggaatccatcggaccgaggtcgaaaacttcctcgtcagtcttctccgttcccttctttccatacaggtcacggatgatattgaccgcgaaatagacgatgtacagcaccgtcagtacaagggcgaatataaagtatgaacccatctgtttttaagtatgaaattaaactttaattgaactttaaaagtacggttgcaaagaaaaatattatatttgatgtaacaaaaactctttatatcaaacagtattttattacatagaaataagtttgaaacactaaaattgaactttaatttcatactttgaggtatcgaagcagaaaaatcgggcataaaaaaagccctccgggaggagagctttcaagggaaagggtaacgatgatgccttaccgtttctttccgcgtaggtaatcgttcaggtccttgtattcgcgataacggggtgcttcgttgcgtacacgcccgccatacatgccggcgatggtctcttccgttttctgccctgcgagatcattgtcgagataacagtggatttcctcgtacacctgcaagtgttccaatgcttttttcaggttgttcaccgagttcatcacgaggtaatcacaaggtgcgtcgatgcagaccgtatcatcacccgcctgtttcagcgtcaggtaagagagaaaatccatgaagccctcgaacacgcaaacacggttctgtgtttcaccatgagattgcctgatgacagagatgtccttacaccggatacagcccttataataaggattgcgcacctcgtacccgcccgccgcgttgccgaaggcaagagcgaagtagcgccgtttacgtaattcataatggacctcccggcagaacatgcggccgatgtccccgtcgattccacgggaatgaaggtacgagagtagcgcatggtgctgcaacggcacgacgagcacgtccttcatgtcagcttcgacgggacggggtgttgtccccggaatccgcactctttgtatcggggcagcattttcatgtctcccgatacaggcaagcacttcgctcacgctgttcgtccggtacaggtatttgcccagttccacaaggtcgccgcccgtcgctgcgccaaagtcataccattcgttgagccggtcgttgaccttgaacgacggagtgcgttcatcgcgcagcggtgacagataccagtattgttttgatatcacactctggggatggtagccgagactggcgagatagtccacgatacgcagttgttttgcttccgctatggtcatgtcattttcttttcacttgttttcaaaaaacagtttactttggtttttctcctatatatacccggaccaaagtaaactaaattatttttcaccttccgcttcctcgcattcttcgtcgaaaagcagggcttcggtcggggtcacatcgtaataaaagagcttgtcccgtttgacgatcagcttcaggttttccgtcaggtattgcagcagttttatcatgacgctgcgtccccgtttgaacccgatagcctcataggaagccatgagggcctgcagcacgttctcgaaacctttgatgggcctgtccccgaaagcggcggaaagtgcctcccggtgctgttcgatggacaaatccatgaagctgctccgggctttcggtcttacactgccgtcaaacgaatagttatccaccatgaccggcaacccttcgtcatcaacggaaaaggcgaacggtttgaactccttctcgcggatatgcagcgcatgaacttcactgataacgggattctccgcacttttggtgatgaccagcaccgtttccgccttattgctcatttccgtaccgatatgcccgcgcacattgttgtcgcccttgttcaggtgtagcacacaatggatgtgcaggtcgtatttcgacgaccactccatcatcttgttgatgacctccaccgattcgctggtgctgttgatgtcgagcatcaggtcgcggatgccgtctatgatgaccagcccataccccttgttctgacgcagggcatagtcgataaccccgatacggacggcaggagtgtattcccgcaggcaaatgaaatcgagattctcgttgtccgtcgtggtgggcagccccgccaggcggagaatgcgttccaatacgttgtggcaatggaaacggctctgttcagtgtccacgtacagaatcctgcgtttgccttcgggcaggtgcgcccgatagttcaagacctgccggcccgccagcgacgcggcgacgatggccgagacgttgaacgtctttttcgccttcgccttacccgtcgaagcgctgaaattaccgagcgtcgctatggtggagttgtcaatccatataatctggggcggagtctcgtaggtgtccgtggcctttatttgcgatgcagtgaggatatccgacaggcggttctcgtccagctccgcccacgagttacggtcagttcttttttcgttttccatagcgcttctggttaaagaacggttgggttgcggacacttccgtcgccatacgcatggcatcgtccaccgtaggttcgtagttttgcaagagccacgcgtccagctcttccttcgcaaagtagagcatcttgccgcgaggcttgtagtgcgggatttccttgttcgatgtgagtttgtacaacatactttcggacacgccgatatacatgcacgcctcttgaaaagtgaagaccttcttggtcgtgtaaatggtattttccagcaaagccacacgctccaacagaccttccaccggttccaacttcttgagaaccgcttctatggcggtcagccgttcgctcaaccgctccatgaatgttgttctgttttgcataaaatacatgttaaaattagacaatggagagttacctccgttatgcagcgcgctaacggaggtcaaagttatgtgatgtgaaccggacagccggaaataccggcgtgatactatgcacgtatcacggcaactgtcactgttttatctttcacatacttggctttttggcacttcgtgtcatattttcagtcggctgacggcttttcgtatgccgaggtttgccgatgtaatgttgttcctcgccgcagacagggcggacgagaggcttgaagcggtaacgtatcttgtgccgtctttggacaacaggaaccgccccttgtcgagaaccgactgccagtgaggcaggatgaaggtgttttcgagcaacgcgtcgaacaggaccgccacatggcggatattgttcacacgtatgcagaagcccttcttgcaggcaaaaagcgcttccatgtcctcgatgcggagtgtggaaacgcaaaacagatgataagcgttggcgcaagccacaatacctgtcatctgttcacgggaaaaattacaaccgaaggagagaggtggatcgtttctggaatcttctatacgtgaagagccgaaccatactccggcaatgtcgtactttcgtttcaaggccatgcactcctcgaaagaaaatgtttctgcggtaaagaggcttttgacgagacttgtgcaatcgatcaacagccctctgatgatatggatgttcatttcatggcaattcctgcaaaccgcactgttgcagtcgatgtaccggtgactgtttataaagtcatccacatagcggccataccgtttgccgcctgccatgacgtcttgaagataaagctccctcgcttcggagagcaattcgtaaaattcttccgctacatcctgttccgtagcgaagtggtgcagatgtggtctcccttcaaaaaaagagaggacctgttgttttgtcctttcatgtcgaattgtttttatgggtttatacttattataatagtggcattacttcgactatttgaaaagtcggagaaaagccggaaatatttacctgtaaattgaatttgacatgtataactacatcagtcgaatagcccgttgaccaaattgactgcttcgtcttttttctggttgatgattttggcgtacacctgtgtcattctcacggaggtatgaccaagcagcttcgatacggtatagagatccgcaccgagcgtcagcatcatggtcgcgaatgtgtgccgggccgtgtgaaaagtaaaacgcttggtgattccggccgcttcggcccacggcttgagatactggttgatgtttgaaggcaagctgaacacatggtcatccgccgccttgtcctcacgctccggcatccacttcaacgcctcgttggagagtggcaggtaaatcggttctttggtcttctgcatagccaccgccagacggtattggccgttatcgacaaagacattcttccatttcaggccgacaatatcgctgatacgcagtccgcagaagcaggaaaacagataggcgtttttaaccctcccatcctgtaccggagtggcaatcaacgcccgtacctcttcgatggtcatataggaccgcacgctctccggcattttgggcttctccgatttttccatttcattaaacggatttctcaacaaccgtttagcccggacggcagtgttcagggcaccgttgaatatctgataataggtattgcgtgtagatgctgctatcggctttcctttagggcggaaggtcgtcagcatgtagtcgatatagccttggcaaaaagcgaggtcaacccgatccaacaaaaacctttcccctgcatattctttcaggatatgggtaacggccttgatttgaccgatgcctttcttgtcgcgtttctcttggtactccaaataggtttgcatccagtccagcagataaaccttatctgtatggttcacgataccggcttcgccgctggtcagttcgataatgcgtttcgacttgatggcattcgcagcggccattgttatttcattctgccgacgggtattgttgtccgttcccgggataagatacagcttcaggtactcatatgtccgcttgccattgcggtatatatccagatacagacttttgctgccatcggacaaatccttcatccgaagacggatgggctcttttacttttttaggcttctttattcgtggcataatcgtattctttcattcgttctttttcgtatgcaaatgtacgaattaaaaccgaaatcaagaaacaaacaaggaacaaaaatgtacccaaaaagaactaattaacagaaaatagcgaaaaaaactgaaagaaacgatttctttataaatgtctgatataaagcctatttgcttgtacttatttggattttattttcatctttaatatgtctgtttgtttattgtaaataaaaaaacttcagaaaaaaacgttttttccctcacccgcttcttaatctcgtgtgtccactaaatacaaagagattaagaacctatttataactttaaacaaactaagtatgaagaacagagtattgcttatattgttattgagctttgctgtaagtcttgcggcgtcggctcagaaaataacaatgaatcttcaacaagtcaagttggagaaagtcttttcgctcattactaaacagacaggacttacggtagcatatagccgtacgattgtcaatcccgaacggattgtttctgtccaggcaaaagacaaagacctttctaaagtattggatgatttatttgcgggtacaaatgtagcttatgaaattggagagaagaaaatatatttgaaagcaaaagaagctcccgtagcatcacaagggagccaaaaaacaaagaaaataacgggaaccgtgacggatatcaaaggcgaaccgataattggtgccagtgtattggtgaaaggagcggggacgggtactgtgacagacgttgatggtaactttacattggatgctccgacagatgctcttctggcagtcagctatattggttataaaacacaggaagtaaaggtggggaataagaactcatattctatccaattgcaggacgacaccgaagtactggatgaagtcgtagtagttggttacggcgtgcagaagaaatcaagtctgacaggtgccgttgcttccatctcttctcaggaaatcagcaaacaggtatcatctaatgttgcttcaaccttacaaggacgtacgccgggtgtagacattgtgcagcaagcgggtgtggcaggtgcagatgtaaatatcgtgattcgtggtgctgcttcttttggcgctaccgaacctctttatgtcattgatggagcattcagtaatgctggattaagctcattgaatcccaatgatattgaatctatcgaagtactgaaagacggtgcggcagccgctatctatggttcacgtgccgccaatggtgtcgttttgattactaccaagaaaggaaagtccggtaagcccgtcattcagatagacggttcgttcgcattccagaaaacgactaatattccggagttcctcaatgcgtcggaatggagagaatttgccaatatggtggcagataacagtggcttgcctcatgcaccggagaatgacaatcccaccaatccgaacctgaataccgattggtcaaaagaatggatacagtttgccccggtatggaatctgaatgccagtatcgcagggggtggggataactctactttcagcacaagccttggttatcttgaccaaaccggtatgacgatttattcggattataaacgttataacttccgcctgaatacctcttataaaaaaggacgtttctcattttctgaaaccctcggactgacgcataaggataaaactcctacaacagctttcaacatagctttaccaacgttacctatttatgatgaacaaggacggtttacctctggtggccctgattattacatcaaccccgaagatggcaaagcgcagaataagatagccccattgcattatacagaccagtttaataaagtgacggatttaatcggctctttgaatgcccaactggatatttggggcggcttaaaatacaaattatcgttgagtggaaattatagcaataagcataattacacccatacccccgagtactatacaaagtggaacttggatggaactcccgataaagattacggcaacacacgtaacagtgtatcggaaacaagaggtgaagagttcacctatacgattgataacttgctgacttacaacaagacattcaaccgtcactcaatagacgctttattaggaacaagctggatgagagaatactatcgttacatgaccaactctaccattaacgatttgggaggaacggatattaccggattccaaaatgaagatggtaagatttcggcaggcgacagtaatgcagcattgctctctttcttcgcccgtgtgaattacgattatgataataaatatctgctgtccttgagtatccgccgggatgaatcttccaaattccataaagacaatagagtaggttacttcccctctgtctccgccggatggaatgtgcaccaggaaaaatggtttcaaaatcctgtaatgagcaaattgaagatcagggctagctacggtgagttgggtgccaacttcctcaatccttataattttgacgcgatagcttatggacctattccttacacagtaggcggtgaacgttatgtaacaggacgcgcagcctatctgaaatcgaaagacttgaaatgggaaactgccaaaaccacagatattggtatcgaactgggcttcttcaacaacgacttgaccttgtcattagactatttcgtgaaaaagaacgtagatttgttggcacagatagacttgaacctgtcttccgggcaaatctttgaaatcaacagttcacgtgaaaaaccctacgttaatacagcttccgtaaaaaacacaggatgggagtttatgatgaattacaggaaacaattgacgaaagacttccatatagatgcaacattcaatatcgcaacgttgaagaataaagtattatcattgggagaaaacgtgcagccgattacttccggagcaatgtccagctattttaatgatgcagcttccattaccatgccaggagaagctatcggttcattctatggctataagattgacggttttgatgcggaaggaaattttatatttgcggatacggacaagaatggagtagtcaatgcaaatgataaagttattctgggcagccctatccctgacttcacatacggcttgaacatcaatatggaatacaaagactttgatttgactgtcttctttcagggagtgcagggaaatgatatattcaatcagaaaaagtacacctattattttgattattccaataatgtggtcaaagaggctatgaatggatggacgaaaacaaataggaatacaggaatccctattatgaaaacccaaaacactagtggcggaaactccctgccgagtgaattttatgttgaagacggttcctatttacgtctgaagaatcttcagcttggttattcgttacctaaaaagtggttggaagcaatccggtttaataaactgcgtgtttatgcaggcgtacaaaatctgtttacgctgaccaaatactccggttatgacccggaagtcagttcaaatgtattgttctcacgtggcattgacatcagttcatatcctaatgcccggacattcacttttggttttaacgcttcattctgataactaaaaatatgattaatatgaaaaactataagaaagtatatgccgcatttatcttggcgggcggcttgatattacacggatgcaacggtatctttgatgacctgtcaattaatccgaaccagccgagtatgggagcttatttcaccagtccgtccgctgttaatgacgcagtgatgaccatgtacgggtatatgtctacgcaacgctgcctgggagcttccggctctaagacaacgataatccgctccgacgaggcatcgtccaattcggattatggaaagccgggcatgtttggtgccgacttaaatgccagttattacactatcgagcaaccttatacattgatgtacaccacagcatcccaagcatcctacattattgaaaccaccccgtctgttgatttcagcggtaatgaggaactgcggaacgcatacatgggggaagcctatttttggagggcatttgcgcattattacctattgattaatttccggaatatatctcccatcagacagatgccacgcaatggcgatgactatgtccgtcctttggaaaaacctgctgccgtatggaattttattcaagaagacctggcacacgcgaaagaactgctgcccgtgaagggatattgggacagcaagaatgccggtcgtgtgacaaaagcttccgcagccgccttattgggaaaagcttacctctaccgtagtggaatcgaacaatattatggtgaagacaagactacattttacagtgaagctgccaaagaatttggtgatgttatagacggaaagtacggaacttatgacctgactaaaaattatgctgataattttgatgttgctcatgaaaataatgaagaatcaatccttgagtttcaattcttaggcgatgtcgataatgcaggattcaatccggggcttgccacttccggtttggcgttcgattcacgtggactgatgttgccgggagcgggagtaggttatgaaggcgtagtacataactggctttataacgcatttgtgaattcggtagacaaggacggttatacggatatccggatgttctctacaatgatattcaatgatttggatgcaagtattcatttgagaaatgacgcaggtggcaacccgatacgtctgaaaggccccggcggatataaatgggaagaactttatcctgcaaagaatggaaaagagggattcgccaccgtatccaatcctttggcgcactcattcaaagcaggtataagaaaagggattgattgttccatgcctacacaaacggaagcagacgggactcctaaactggtcggtgtaggtgcaggcgttaaggagtatgtatataatcagccccgtgcccatggagtgaattggcgctatatccgctatgccgatgtgttgatgatgtatgcagaatccgttgtcagcggtggcacaccagcatcaaatatgactcccttgcaggcggtaaataaagtacgcggacgtgccaacatgagcgaactcccttccgtaaccatgactgatattcagaatgaaagaatcctggaatttgctttggaaggacatcgtttctatgatttgctccgttggggcaagctgaccagccgttttacagagttgcaggaatccgatcctaacttcaagaagttcatatcggcagatgactttaaaggattcgtcaccaataagcacgaatggttgccgattcctatcaatgaagtgaattctaacccttatatcacagaaaataatccgggatattaactaagaaagaattagcatgataaatttgaaaaatattgcggtactactgttcagtttggtagtaccggggctcgctattgcccaaacagaagtactttacaatggcatacacctgcctgaacaatggccaccccgctatacggagccacaaaaagcacaagatatgccgataccctatcttaaacaaaagccggaagtaatccctgtaaatatagggcggcaactgtttgttgattcctttctgattgcagaaactaatttggatagagtgattcatactccccggttctacgaagggaatccggtactcgaacctgataaggaatgggaaaagacaaccgaaggcggactctacgctgcacccttcagtgatgggatctggtatgacgaaaaagacgggaagttcaaaatgtggtacttggcaggtgcaggtgttcttcacaaaggagacaatcagaccttttataccggatatgccgaatcggaagacggcaagcactggacaaaacctgtactggatatttggaaccaaaccaatattgtagatacctgcaatcgcgacgcagctactatttggctggacaaacaggagaaagacccgtccaaacggtacaagatgttcaatgtcgaacgccgccccaccgaccgcagatggcaatttatcttgaaatactcatcggacgggattcattggggagagggagtagcccagtccggtgatttatacgaccgttcatccgcattctacaatccgttccgtgatgtgtgggcattgagtatgcgttacgggacaacagtttcttcccgctcacgcagttatttggaaaataaagacccggaaatggcagtaagtttcgcacatcgtatccgaaaaggagtacctgataagaatatggtctactggtttactccgagcgataaagagccgcgtcatccggagtttccggaagtagaaccgggtatttacaattttgatgccattgcttatgaaagcattatgttaggattgtacagtgtatggcagggaccggaaaatggagtttgtgccaaactaggtattcagaaaaagaatgaaatctttctagggtatagccgtgacggcttccatttctatcgtccttctttcaagcctttcatggcagtgaatgagacggaaggagcatggaactggggaaatatgcagtctatcaatggagtgcctttgatagtaggagattcactttatttctattctagcggacgccaaaggaacaagattatgtgggatagctatacatctaccggactggctactttgcgcagagatggttttgtctccatgcatggagataaggacggctatctgctgacggagaaggttcgttttgacagcaaacatctttttatcaatgcagatgtaaaaggtagcttggctgtagaaattctggatgaaaatggaaagccattagaaggattcacacggaaagactgtgtaccgatgaagaaaacagataaaacaaaattgttggttacatggaagaaacaccaggatatagcatcacttatcgggaaggctgtccgtttgaagttctacctgaataacgctgatatatatgcattttggatttctccgtggcaaacgggcgaaagccgtggatatacaagcggcggcggaccgggactgtcaacctgtggcatagatgttcctgcaaacaaataaaagataaatgactatgaaacgtttattttatacattactatttttcctgccttgtatgctgatagcttgcggtggcagtgatgatactccggatggagataataatcccccggtagtggctccccctagcgaagagccggtagattcacggctattgtacaatggtattcgtctgcccgaacagtggccgccggtacgttcatcttcgtctgaactggaaaaaggaatgtcacctttttatctgtcggataaaccttctgttattaatatctcggtaggacgccagttatttgtagacaatttcctgatagaatccactaatctgaaacgtacgttctattatcctgaatattattcaggcaatccgatactgacaccagaacaggattgggagaaaactggaacaaaaggtgcggcattcgccgctcctttcagcgacggggtatggtatgacgaaaaggaaggaaaatacaaaatgtggtacatggcaggtggtggctcctatgcaactagcggagcaggagtgacttgttatgcggaatcaacggacggtattcactggacaaaacccactctttccgttgtagccggaacaaatatcgttgactataactcagaacgtgacgcgtctgttatttggctggataaacaggaaagtaatgcttcgaaaagatacaagatgtttttagttgcccgtgaatccgggaaatggagataccattacaagacttccccggacggcaaagtctggcgtgccgcagttcaatcggaagcgattgccgaccgttcaacagtatataaaaatcctttcagaaacgtttgggtatatagtatgcggcataatgttcgggtggatgcgaataagctggtacgtgcgagggattataatgaaaacaccgatccggaagccggaacaaagaaagcggaagcattattgagtgcattctggtttggtccgtgggctaatgagcaacaccatacagactatccgaatatagcgcctgcgatatataatcaggatgccacgccttatgaaagcattatgctgggattcttctccgtttggcaaggaccggaaaatgatgtttgtgcttcggacaacgtaatcaagagaaatcaagttatggtaggatatagccgtgacggttacagttggttccgtgaggatatgaatcctttccatgccgtaaatacgaccacctcggacgcatggaatcaaggtaacctgcaatccgtagccggagcaccgttaatagtaggtgacaaactctatttctatctgagcggtcgtcgtttgagaggcactcaagagattaccactaccgggcttgccatgcttcgtcgcgatggatttgcatctatgaaaggaacaggagagttgcaaacttccttactgaaatttgacggttcgtacttctttgtcaatgccaatgtcacgggagaaatgaaagtggaacttttagatcccaataataaagtaatcgaaggattctcaaaagatgagtgcaaagcctttaaaggggataatgtaaaagcgaagatagaatggacaggcaacgcttcattagcctctttgaagaacaaacaactgaaagtgaaattctatattgataacggtgaaatatttgctttttggatttctccttctgcgaatggagagagtatgggatacaccgctggcggaggtcccgggttgaatatttccggaatagataaaaccaattaaaaaatgaatactatgaacagattagcttatttattatcattgatttgtattcttgcattttcttcttgcgaagaggataaggtatattatcacactgcggcaaaggcagactttaccattggtgagaatatgtacgaactgggacagaccgctgtttttaaagatgcttccatacccgatgaaggaagccggatagtagcatggttatgggagtttggcgatacaaaaaaatccgtctcgacggaacagaatccaactttcgtttatcaatcggacggtacatttaccattaaactgacggtgactgatgataacggcttgagcgcgacagccaagaaagaccttaccatcttggatcccgctaaagcaatcaatgtaatgtggcagaaagaaatgggcggacctattgaaagtacagtctcacctgcattgtcggctgatggtaaaacggtttatatgattaccgaccagacttccacaggagcatttgacgtgaaactttatgcttatgatacggaaaatgggacacaaaaatgggcatttgacgtaaccgccaacatgaatgaactgaatccgggtggtggggcaagcatggtatatgcaagtccggcagtaggaccgaatggagatgtgtatattgtggtccgcgatttgaagccggctaccactgaacatccccgtgctttattcttatttgccataggaagcaatggtagtagaaaatgggcatacaaagctgccgattctaatttatatgctgttactccggctattgacgcatctggtaatatctacttcggacatagaggaaagaaactaatcgtattaagtcctgccggtgatgtagtcaaagaaatagctttagatgtagaagtgttgtccggtatgtctctgtccaaagacggaactgtctatttcggctcttccaagaatacggggtatttcggttatgattttgctaccggtactcaaaagtttgtctatcagaaagatttgggtggtacagcattgaaaggaaactcgtacacagtaggaacggacggaactatttataccgtagccgaactgacatcaggtggcgccatcatagctctgaatcctgacggaacggaaaaatgggtgtacaagacaccgggagccattgttaacggtggtgttgtgattggtacggatggaacgctttatgccaacggtggaaatactgttgccggtgaagcttcggcaggtgttttcgctttgaattcggacggttctttaaaatggcattatgctacaacggaggacgttagcaactgcgtgccaatcatcgataacagaggatatatccacatcatttcggacaaagccatctattatattgtgaaacaagacggtagtttgcttgcatccgccgaattaggagttaaatgtacctccagtccggtaatggattcaagaggatatttatatatcggcatagaagctgtcgcaggtgcatctgatatggtatgtatctcatctggagctacttcctatgcagcttctgcatggccgatgaaaggccagaatccgcaacggacaggtttgcaaaagtaagtagtttaaaatgtagacgattatgaagaaatattctttattggcagttttcttattattaatgtgcaatgtttcggtatgcgggcaaacaggacgtatcctttttgtggatacaacattcattgagaaaacaaatctgcaacgaatacatcattcccccgtctattattcaggcaatcctgtattgaaggctgataaaaaatgggagttgaatataaatggtgacccttatgccgccccttttagcggtggcgtatggtatgatgaggaagagcaaaaattcaagatgtggtattctgccggtggcgggaagttattagggctcgtcacttgctatgcagagtcgttcgacgggaaagtctggataaaaccggagctggacgttgttccgggaaccaatatcgtagatacattagagcatgattgcgtttccgtgttgcttgataaatttgagaaagaccggacgaagcgttataaaatgtttgttgtagaatttaataatcgcttcacagtcagcatgaaactcaaatattcttctgacggaatccattggagtgagccgaaagctctttcgggagaattgtacgaccgttgtgcggcttattacgacccgtttcgcaagaaatatgtcctgtcattgaaaaccataaatggagtgtataggcgttcacgcaattatttggaacatgaagatccggaaatgctggttagcctggcacataggatatatgacaacaagagtgataagtttatccgttattggtttaatgccgatgacgacgatccgcgtcatcctcaatttcccgaactgcgtccacagatatacaatcatgaagcaatgccgtatgagggctgtatattaggctacttcaccgtttggcagggaccggagaacaatgtttgtgacagtctgaacattcaaaaaaggaatgaagtcctgataggttggagcaaagacggttttcattggaaccgggaaaacaagaaaccatttcttcctgtcagtgaggactttcatgcatggaatgcaggcaatgtacagtctactgcgggtagccctctgatagtcggagactctctttatttttatgtcagtggacgctataacagcaagccgaaacatgattccaattttgccacaggacttgcgatgcttcgtcgtgatggttttgtttcgatgcgggcaggaagaaaagaaggatatgtagaaataaaaactaagattccggcaaatggaaactatttgtttgtaaatgcagatgtgaagggaactttagcggtagaagtgttggatgataacggtcagccaatggaaggatttacaaagaaagactgcatatcaatgaaaaaatcggataaaacgaaacagatgatttcatgggaaaaacatccaggcgtaacatcactggtggggaaaacagtccggttgaagttttatctgaatcaggcggatatctatgcattttggatttcggcatggcaaacaggcgaaagtggtggatataccggcggtggaggaccgggactatcagacaagggtatagatacccccatggataaattgaaaaataactaaatatattaaacttaaaaaaagaaactgtattatggaaaagattataggattaatcaatgctccttttactccgttttatgaaaatggagaagtaaattatgaaccaatcgaagcctatgcaaagctacttgtaaaaaatggcttgaaaggtgttttcatcaacggttcttctggagaagggtatatgttgactgatgaagaacgaatgaagttggcagaacgttggatggaagttgcaccggatggctttaaggttattgtacacgtggggagttgctgcgtaaagtcaagccggatgctggcggaacatgcgcagaaaatcggagcttggggaattggtgcaatggcacctcctttcccgaaaataggacgaatagaagaattggtaaagtactgcgaagaaatcgctgccggagcaccgaagctgcccttctattattatcacattcctgcattcaatggagcattcttatcgatgcttgctttcctgaaagctgttgaaaaccgtattcccaattttgcgggaatcaaatataccttcgaaagcctgtatgaatacaatcaatgtcgtttgtataaagacggcaagttcgatatgcttcacgggcaggatgaaaccattcttccttgtctcgcaatgggaggggcgcaaggcggaatcggcggaacgaccaactataacggtataaacctggtaggtatcattgatgcctggaaagccggtgaattggagcaagcccgtgaattgcaaaacttctctcaggaagtgattaacgtaatctgccatttccgtgggaatattgttggtggcaaacgtatcatgaagcttatcggacttgatttgggcggcaaccgtactcctttccaaaacatgaccgctgacgaagaaaaacaaatgaaagcggaactggaagaaatccgtttcttcgaacgttgcaataaattctaacaggaggacgtatgaagaatattactgactatatacaacaatgggctaatacctataaggatgatatgcagaataatatcatgcccttttggataaagtatggactggatagagtgaatggtggtatatatacttgtgtagatcgcgacggtgcattaatggatagtacaaaatccgtttggtttcaggggcgttttgcatttacttgttcctatgcctataatcatatagaaaagaatccggcatggttgcaagccgcaaaaagcacactagactttatagagaagtattgctttgattcggacgggcgtatgtactttgagatgacagcagacggtcgccctttacgtaagcgccgttatattttctccgagtcatttgcagccatagcgatgtccgaatattcgatagcgtcgggggataagacgtatgcggtgaaggcactcgaactgttcaaacgtatgcaatatttcctgcaaactcccggactgcttgctcccaaatatacagatacgctccccatgaaaggacattccatcaccatgatattgataaacgtagcttcccgaatcagggaagctattcaagacgaatgtctgacacggcagattgacgagtccattagctgtctggaaaaagatttcctacatccggagttcaaggcattattggaaaccgtaggaccgaacggagaatttatagactccaatatggggcgtaccatcaatccggggcattgtatcgaaacagcttggtttttgctggaagaatccaagctccggggaagggatcaaaacataaaagaactggggctgaagattctggactggtcatgggagtggggctgggataaagaattcggcggtattatcaatttcaaagattgcaggaatcttccttcgcaggactatgcgcaggatatgaaattctggtggccgcaaacagaagcaattatcgctaccctgtatgcctatctgatgacgaaagaagagaaatacctgaagatgcatcaacaaatcagcgagtggacatatacacatttcccggacaaagaatacggagagtggtatggctatctccatcgggatggaacagtcgcccagccggcaaaaggaaatttatttaaaggaccttttcatatccctcgcatgatgacaaaaggatatatgctttgtgaggaaataatgtctgaaataaaaaaagaaataagatgattgtatccaatttacaaaatagccaacgggtggagaaacttcacccgttgttcaaacagcttttcgattatgtgaaatcgcacgatctgttgcacgaggaactgggaactatcagactggatggtgataatctgattgtcaataatatctatcccgaatgtattcctgaaggaaagcgtttattagaactgcatcacgattatattgatgtgcacatattgcttgaaggcaaagaaaccattggctggaaagccttggaagaattaaaagtggaaagacaagcttatgataaaaagagtgattgtgccctatatggtgacgttcctactactttcatcaatctcttgcccggacaattcgtcattgtatatccggaggacccccatgctccggctatcggtaaaggctggatacgcaaactgatagctaaagtaaaagtctaagtaaacagtctcaaaaatcttttaaatataactaccatgaaaaataaaaatatttatccatgggtagtggttgcgttgctttgggtagtagcgttgctcaactacatggatagacaaatgctttctacaatgcaggaagcaatgaaaatagatattgtagagctgacgaaggcagaagctttcggtgcattaatggcagtctttctttggatttacggctttatgagcccggttgccggaattattgcagacaggcttagtcgtaaatggttaattgtcggaagcttgtttgtttggtcggctgtaacattcctgatgggatatgccacgacgtttgagcaattatatggtttgcgtgcagtgatggggattagtgaagcattgtatattccttccgctctgtccttgatagcggattggcatcaggacaaatcacgctcattggcaattggagttcacatgaccggactgtatgtcggtcaggcaatcggtgggtttggagctacggcagccgctgcattttcctggcagagcacttttcactggtttggcattgtaggtattgcttattctgtggttcttatctttttcctgcatgagaatcctgtccgaatgaaaatagaaaaggttgttgctaatggcattagcaaggggaattcaattggaaaagggctgttactgttattttcaaatatttctttttgggtgatattattttattttgcggctccaagtttaccggggtgggctacaaagaactggttgccaacgctatttgcggagaacctggatattccgatgtcacaggcaggaccaatatctacgattaccattgctctatcttcatttgtcggagtaatattgggaggattcttgtcggatagatgggtgctgaagaatatccgcggacgtgtctacacaggggcaatcggactggggatgactatccccgcactgttattgttaggtttcggacacggtttcattagcgtaataggtgcaggattattgttcggcatcggctttggtattttcgatgccaacaatatgcctattctatgccagttcgtttctgctaaatatagggggacggcatatggtattatgaatatgacaggagtttttgcaggagctgcagtaactcaattattgggaaaatggacggacggtggaagtctgggcgaaggatttgctatgcttagtattgtcgttgcacttgcattagggctacaaatctactttttaagacctaaaacggataatatggagtaatacaatgatggttatagtttggggtgttatgagtaataagaagaaaagaatattagtgtaaagctcatttattatctcaaatgtatagatatatttgtgaatattgcattcgtactattcttactcttaaactgttttctttttattatacaggatgctaataaactcaatttgcatttttaataaataatgaaacagtttattataaacgggtcttacatttataataaatgatattcgggataattcactaagtaggcacgagtatattaaacaaaatggggtgaaatctatgtagattccaccccatttctattctttcagatacatatttatgtttctgaaaattctctttatgtctttatttttgtatatatcatatctgttgtctgctaattggttattgcaaatatacgaaattaaaagaggaaagtcaatagctttttaaaatttgatgtgatacaacacatgcctgcacaacggatgctcaccagggacaagcggatgatcaaattctctaattcgttccattcctattttctgcattacacgttctgaccgttggttgagaagggaagtaaaagaaaagagttcttttatatccgttttattgcgtgtatattccaaacaagctgttgcagcttcaggagcataaccctgtccccaatattcgtgtgctaaccgccagcctatttctatgcctggagcaaagtctacatcaaatgtaatctgatgtagtccggtatagcccataaaagcatgatcttcttttcgttctacagcatacaaaccgaagccacaggtttggaactcattttgaatacgctgataaaaggcaaatgattcttccgatgacaatgaattaagaaaaaactccatcacattcggatcggcattcatacgggcaaaaaacgggatgtcttcttctttccagtcgcggagaatcagacggggtgtttctatatacttttgcataataatgataataatggaatgcaaagatacaattctttttccttgttggaggttattcattattataagtattaactattattcattgaatcccctcttcacttatggtcagtctagtcagcagcatgatacgggtgtgtaaaccagaagcaggaacctactccttcggtcgaatccacgccaatttctcctcccatttgggaaacaatgcttttgcagatagaaagtccgagtcctgtaccctgaacaaaggtattgagcttcacaaaacgttcgaatatactcttttgcttttcttctggtattcccattccggtgtcgcgcacatagaattttattttctgatgggatacttgttcatatcccagggtaatacagccttgctgggtgaactttaatgcgttatttataaagttactgataacttgagtgaatctgtttttgtcagtgtagagataacattccgggaatggttcctcaaaaatcaattcaacacctttactcactttcatactcattgatttgatgatttcagcacacgtctcatttacatccacattggtatatacaaaattaaatgttcccgcttcgattttcgaaagatcgagaatatccgatatcagttgcaagagaagttcattattctcttgcacaatcttgatatattcctgccgttcgcttctgctgtccgtttctgccagaaggctggaaaagccgacaatagcattgagaggagtacggatctcatgactcatgttagccaggaaagccgacttcagacgatccagttcttccgctttatcgcgggcaataatcaatttctgttcagtctctttcaaaggcgtgatgtcataattgatacacaacatctcgataatgccgtcttgcggacggtaatccctgaccatcacattgatgctggtccatgtatatttgccattctccctgcatacacgaacttctttacgcaaactggttgcctttcccgttttcacttcacctacaaagtttttcagaacagcctgatcttcaggaactacatgtgcatatactccaataacctgtggcatgggagtaccttctttttcacccaaattcctgtaccatgtatcttgggcatatccatctcttgtcaatacattgaaatgagcaaatcctaccttggcataatcaccgattagaagaaacagattctcaaactcctgtatcttagtgtatgcattggtcgtttccgttgtatctatgttgataaacagatagttgataaactgattttgagaatcatagagagcagtaacctttgtagtaagattgataatcccatttctccgggtgttcacatactggcttatttttgagaaatcataatcaatggagaaatcgacatcttctttcgctcttaatttctcttttacttctgaaggaatatcgggattatcgaacaaattaactcttaatgcttcattcttgtcagacaagccgaatatttcaagctctttatcattaatatctaccagataaccgtctttgtcataaagttcgacgccagccggaagattcttatagatgtttctcaatatcttttcgctgttgtccaaagctagacgatcttctttggcttgtaattccgactttcgcaattcgatgcaaatactgataatattagcaagagaggagaagcattgataatccacattgctccagctacgctgcgttcttaccatatcaattcccatatagccccatacctcttctttagagattagcggaactaccatcagcgacttgatatcttgtatctccaacgtctgacgatattccgcagcttcttcgggcatgtcgtccagcgtgttcagaatgatagcccttctttcggctatctgatgattccaccaggtagaagggtcccagggaatattgctcaagaattcctgttccttggatattccttcggcggtaacctcataagtgcaatcctggcgttgttcttttcggtttatttcgaagatatagatacgatcgcccaaaaactggttgaggagatctcctaatgtcttgttaaccacttgagtgacatcatcacattgcagaaaagcaagcaatgaatatgaaatattagtttgttggtaaagcagattgctcacttgaaagaaatcaatgttttcattcgtagtatcgatcggtctgtcaatatattgcagaaagcccgtcatattcctatatccctctttatcgggcttttggaaattaatcttagagtacacccatatttccccgtcttttgcccggattgggaacatttgttcgtatgtctccagataagaaagagacatatattcatttttaagacgcagccggtgatcttcacgtattctttggtgaaattcggtgaaactgatgcggttactttcaagaccgagtaagtcaacaataaagtcggaacagatatattcttgattcttcaaatcagattcccaccatcccattttggccatttttgctatctgaacgtatttttcatagtcataatttgtttgttctttcatattgtttgctcttgttttctgttttatattataagctagccggcaaagataagcataacttttaaataatgaggcgtttgcatatcacagcaggatgaaagtggaaatttggtgctgaaaagtggaaaaagagacaaatgagtacaaacaggggattatttcgtctttctcttagtgaagaagtgaattatataatctataatatatatcagaagaatgaaaaataccagattattcatgtttgcggcatgcacactttttttggcagcgtgtggcaggcaaaccgtgaagattatgactccgccggatgcgtcaaatcgtgttttgtttggtgcggagcagttacagactaccttggataaagccggttatcaggtaatgatgcaacagggagacacgacattctccgatcctgaaatcaaaacgattctgttgacggaagtaaatgacacgacactcaagaaagaaggttttcatatttcgacgacgggcaatctgaccagagtgtccggcagggatgggagtggtgtcatttacggatgccgtgaactgattgaccgtgtgaatgattcggatggtaagttgaacttcccggaggaactgaaagacggtcctgaaatggtattgcgtggtgcatgtgtaggattacagaagatgacctacctgccgggacatggtgtatacgaatatccgtatacgccggaaagtttcccctggttttatgataaagaacaatggattaaatacttggatatgttggttgccaaccgcatgaattcgctgtacctttggaacggtcatccgtttgcgtcattggtgaaactggaagattatccgtttgcactggaagtagatgaagaaacattcaagatgaatgaagaaatgttctctttcctcacagaagaagcggacaaacgcggtatctttgtgatacagatgttttataatattattctttccaaaccttttgctgaacattacggactgaaaacacaggatcgtaaccgtcccattactcctctgattgccgattatacacgcaagagtattgccgctttcattgaaaaatatcccaatgtaggattactggtttgtctgggtgaagcgatgtgtacagtggaggacgatgtggaatggtttactaaaacaattattccgggagtgaaagacggattacaggctttgggacgtacggatgaaccgccccttttattgcgtgcacacgatacggactgtaaactggtgatggatgctgcactgccactctataagaatctttatacgatgcataagtataatggtgaatcgttgactacctatgagcctcgtggtccctgggcgaaaattcatacagatttgagttcgttgggttccattcacatcagtaacgtgcatattctggcaaatttggaaccgttccgctggggatctccggatttcgttcagaaggcggtaactgccatgcacaatgtacatggtgccaatgcattgcacctttatccacaggcttcatattgggattggccttatactgctgataaattgccgaacaatgagcgtgagttccaattggatcgtgactggatttggtatcagacctggggacgctatgcgtggaactgccatcgcaaccgtacagatgaaatgggttactgggaccatcagttgggcaagttctacggaacctctgacgaaaatgcaagtaatatccgtgtagcatacgaagaaagcggagagattgctccgaagttgttacgtcgtttcggtattacagagggaaatcgccaaacgttattactgggtatgtttatgagtcagcttgtcaatccgtacaaatatacgatctatccgggattctatgaaagctgcggaccagaaggagagaagctgatagagtatgtagaaaaagaatggaaaaagcaacctcatgtaggtgaaatgcctttggatattgttgctcaagtaatagaacatggagataaagcagtagcggctattgataaagcagcaggttccgtctcttcaaataaggatgaatttgcacgtttgcagaatgatatgcattgttatcgtgaatttgcgtatgcgttcaacctgaaagtgaaagctgccaaactggtattggattatcaatggggaaaagagattaagaatcttgaagaagctattcctttgatggaacaaagcttggaacactatcgcaaattggtggaactgacggacgaacattacttgtatgccaacagtatgcagactgcccaacgtcgtattcctatcggtggagatgatggaaagaacaagacatggaaagaattgctggtacactatgagaaggaattggagaatttcaaagccaacctcgctttgttgaaagaaaaacagaatggaaatgcggtgactgaaactgtcgagattgctgcctggactcctgcaaacgtgaaactgatttctaattatccgacagtgaaagtggatgagggtatttctttatttgtggatgttccaggtaagatagaagcagtagctccggaattgaaaggaatgaaggcgctccgctttaatggaaatgagcagagagagaaaggcacaagcatcactttcgaaacggatgctccggtgaaattgttagtcgcttatttcaaagacgaccagaaaaagtatgcaaaagctccgaaactggaaatcgatgcgtcagccaatgattacggtcaggcggaacccgtattgacgaatgctgtccgtatcaatggaatgcctttggcaaatgtgcatgcatatagttttccggctggaaagcatacgttgatgttacccaaaggctatctgcaagtgttgggattcacggctgcggaaacgaaagtgcgtaatgctgggcttgccggggatgaagaaacgatggattggttgttttattaatgagaatttatatttcaccacagaggacacggaggacacagagttcttctctctcttttccgcaagtaaaacagagcgatacatacgattataaatacgtaagactctttgttactctatagtggataaaaataataaacctctgcgtcctccgtgtcctctgtggtgaaatattaagtattaaacgattagaaaaagtatcatgaagaagttattgctggcagtttttagtatagccaccactttctctctatatgcgcaacgggaagttccgcaagaacgaatggagcagatttacgaggaagtaaagacaccatacaagtacgggctcgcagttgccccggcagacaattatcataagattgattgtcctaccgtttttcgccagggagacaagtggctgatgacttatgtggtttacaacggtaaaggtggaaccgatggtcgtggttacgaaacgtggatagcagaaagtgataatttgctcgaatggcgcactttgggacgggttctttcttatcgggatggaaaatgggactgcaatcagcgtggcggatttcctgcattgccggatatggaatggggtggaagctatgagcttcagacttataaaggtcgccattggatgacttatatcggtggtgaaggaacgggctacgaagctgtaaaagccccgctttatgtcggactggcatggacgaaaggagatatttctacggcacatgaatgggaatctctggacaaaccgattttgagcatccatgataaagatgcccaatggtgggaaaaactgactcaatataagagtactgtttattgggataaagataaaacattgggagctccgtttgtgatgtattacaacgcgggcggacgtcatccggaaacggatttaaagggcgaacgtgtcggcattgcgctttccaaagatatgaaaacatggaaacgctactccggaaatccggtcttcgcgcacgaagcagatggaaccattacaggagatgcgcatatccaaaagatgggagatgtgtatgtgatgttttacttctctgcttttgaaccttcgcgtaaatataaagcattcaatacatttgccgccagctatgatttggtgaactggactgattggaaaggagccgacctgattatcccctccaagaactacgatgaactgtttgctcataagagctatgtggtgaaacatgacggagtggtttatcatttctattgtgcagtaaacaacgcagagcaacgtggcattgccattgctaccagtaagccaatgggacgttcggctgtccgtttcccggttccggagagtaagaatcgccggcaaatcatgacattgaatgagggttggaaaacctggattacagaggcaactcacttgaaaggtaattttatgatgcctgcaaaaacggtgaatattcctcataattgggacgattattatggataccgtcagttgacacatggaaacctgcatggaacagctatgtatgtgaaagatttcacggcagatgtaaaatccgggaaacggtatttccttcgttttgacggagtgggtacatacgccaccattacagtgaacggaaaggacttcggacgccaccccatagggcgcaccacattgactttggatgtcacagatgcattaaaacagggagtaaatcgcttggaagtgaaagccgagcatcctgaaatgattgccgatatgccttgggtatgtgggggatgttcgtcggaatggggattcagtgaaggttcccagccgttaggtatcttccgtcctgtggtattggaagtaacagatgagattcgcatagaacctttcggtgtacatatttggaatgacgaaaaggctgctaacgtatttgtagaaacagaggtcaagaattatagtaaaacaacagaaacggtagagttagtcaataaactaagcaatgccgatggaaaacaagttttccgtttggttgagaaagttactttagctccgggagaaatgaaagtgattcgccagcaggctcctgttgagaatcctgtcttgtggaatacggaaaatccatatctctataaattggccagcatgataaagcgtgatacgaagacgacggatgatatttcgacacccttcggtattcgtaccattagctggccggtaaaacgaaacgatgtagacggacgtttttacctgaatgggaaacccgtgtttatcaatggagtatgcgagtatgaacatcagttcggacaaagccatgcgttcagtaatgaacaggttgccgcaagggtaaaacagatacgcgcagccggtttcaatgcattccgggatgctcatcagccccatcatctcgattatcagaagtattgggatgaagagggaatcttgttttggacacaattttccgcccacgtgtggtatgacactccggagtttcgtgagaactttaaaaagttgcttcgtcaatgggtgaaagagcgtcgtaattctccgtcagtggtgatgtggggattgcagaatgaaagcactttgcctcgtgagtttgcacaagagtgcagtgaccttatccgggagatggacccgactgccaagacaatgcgtgtcataacaacctgtaatggtggtgagggtacagactggaatgtaattcaaaattggagtggtacgtatggaggagatgtgacgaaatacggtcgtgaactctctcaagcgaatcaattattgaatggggaatatggagcgtggagaagcatcgacctgcatacggaaccgggagatttccaggtgaacggagtgtggagtgaagaccgtatgtgtcagctgatggaaactaaaatccgtttggcagaacaggctaaagatagtgtttgcggacaattccagtggatatacagcagtcatgataatcccggacgtcgtcaaccggatgaagcgtatcgcaagatagataaagtaggtccgttcaattataaaggattggttactccgtgggaagaaccattagacgtatattatatgtatcgcgccaactatgttccggctgcaaaagatccgatggtttacctggtatcacatacatgggccaaccgttttgaaaaaggacgccgtcgtgccactatcggggcttatagcaattgtgattctgtattgctatacaacgatctgacaaatgaaaaggcaaccttcctcggacgtaaaaagaacaacggaacaggcactcattttatgtgggaaaaccgggatattcgttataacgtacttcgtgctgtaggatattataaaggtaaaccggtagcagaagacctgatcctattgaatggtctggagcaagcccctaacttcgaacttctttatcaggatgataaaaagatattgaaaggagaggtaggatataattatctgtatcgtctcaactgtggaggggatgattatacagatagtttcggacagctctggttgcaggacaatacgaattattcccgttcatgggcggagaatttcaaggatctgaatccttatcttgccagtcaacgtaccaccaatgatccgattcatggcactcgtgactggacgttattccaacatttccgcttcggacgtcatcagctggaatatcgtttccctgtggcagacggaacatatcgtattgaactgtatttcacagagccttggcatggcacgggcggaagcgcttctgccgactgtgaaggactgcgcatattcgatgttgccgtgaatgattctgttgtattagatgacttggatatttgggctgaaagcggtcacgatggagtttgtaagaaagtggtatatgccacagtgaaaggtgggatgttgaaaattcatttcccggaagtgaaagcaggacaagccttgatttcaggcattgctatcgccagcacagatcaggaactgaaaccgaagatattccctgcatccggttggagttgggaaaaggcggataaagaagtgatggaaaagactctgaaagagttacttccggaagataaaaatactcgtgtcagtatatcatacggagcggaaatggctgtactgaaaggcaaattccaaaagaaagaacatcgcaaacagttcggagtgttttttggtaaaggaaaaagcaacagcattgaatggaatgtttctaccgggttggcacaagtgtacgcccttcgctttaaatatatgaacactaccggaaaaccaatacctgtcttgatgaaattcattgattcaaaaggagtagtattgaaagaggacgtattgaacttcccggaaacaccggataaatggaagatgatgagcaccactaccggaacctttatcaatgccggacattacaaagtattactttcggcagaaaatatggacggtctggcattcgatgcattggatgttcaataagttttttagaaaaacacacatataaacagaaaaatagaagcgggacattaagaagtttgaatatacttccggtgtcctgcttttcatattctgatactttcttataaataaaaaatagatgttatttttttaagattcgatgttctgattttaattattcgagggagaaacttcaaataatccctatatttgaaatcaaaaacaaaataacacaatggagagcgatttacctaattttgatttgccgtctgattatatggttggagaagggtatgggataaatttattaaaaaggtataaaaactttccttgcagggtaaaagccggttttttcattctttgtgtaaaagggataatgcaaacgacaatcaatgggaatcttcaaaatattggtgaaaatgatttgataaccttaccgcccggatattttatggaaattcttgatttttcaccggatattcatatctattatgccgggttctcatccggattcatagagggtataaatctaatgaagtctacagaacatcttctccctataattatggaaaatccgataataagattatctccattgcaggcttgcagttataaaatgttctatgaatcgtcaattctttcgtatgcttctccaaaaacattggcaaacaaggaaatagtaaaggcggttcttaccatgttccttcagggagccactgaaatctataaaatgcaaaataacttgtatttatcttcccagtcaagaaagtacgagatttatcaggaatttttgcaattggtcatgaaatattatactattcatcacggaacctctttttatgccgaacatctaggacttagcttgccgcatttctgttcaacaataaaaaaggttgcaggaaacactcctttagaagtcatagcttccatcattctgatggatgccaaatcccggctgaagtcaaccaatgaaccggtgaagaatatagccttatctttgggatttaataatatctctttcttcaataagttttttaagcaacatacgggtgttaccccacaggaatacagaggacattaagcttccaccggctgtttttcgagtggtaatgtaacggtaaaacggctgcctcttcctacttccgatacaacagaaatactcccttgcagatgttctacaatcgttttgcagatagagagtcccaaccccgtaccctgcttgaaagtattgactttataaaaacggtcgaatatttctttctggcattcttggggaataccttcccccgtgtcctccacaaacagacaaactgaatcgtcattttccggattaaccataaaaccgaaatgaatatatccttcttctgtaaatttccgggcattatttatgaaattgcatattacttgtttcaagcgtgtagcgtcagtagttatgtaaatatcatcatccggcaagattgcttttatttcgatttccggcacatttttcacgacctgctctttctctatatccttcattatggatttgagggaataattggaataagtaaacttgatagtgtttgattcaatcttggacaaatcaagtatatcgtcaatcaatcgtactaaatgttcgctattgatgctgattagtcgcacgaaatcggcacgttcctcttcacttaactcatcataagtagaacctataacatcagaaaagccgactattgcattcagcggcgtacggatttcatgactcatattggctaaaaatgccattttaagacgatcgctttcttctgcttttttacgtgcctcgattaaggtgttttctatgtctttatattcctgaatactcaagcagattcccactaaccgatagggatgaccggatatgtttgcaatataagtagactgcccttcaaaccattcccaagtaccatccccccggcgcaaacggaatggaactgttttgtcaaaagttgtattaccactaagttgtacaacaaaggcgtcagccatagtttgccgatcgtccggatgaatcatattcacatattcctccattgtcaaagtattattctctccggctggaatacctaaatgttcaaaataacgatcatcaagagtaaattcactacggcttatgtcataataccaggggtatatcctagttctttgcaaggctgtatttaatatatattcttgtgtcagttccactgtaatattacggaaaaagaacaagatgattttttcgccctcttcattttccattgtagcaaattctcctcttatcgggaattgtgtatagtcaacttgttcctgcataaatgtatgttcaggcagtgagtatacttttttgccctgatgaatttcttccaaaatggtcgagagtatatcttctttcttatttaacagcttgaatatcttgttggtcggaagaggcatcatcgcattgactgacgaatgtacatggagttccgtaagagcttgctgattcagttgtatgacttctctatttatatccaatatgataactccgtcaggcagaatattcagcaaatcatcattgtagagtgtttgtccgttcgcttccatattttgttatttttcgttcaatgtacaagataataattaaattcataacaaagaaagccattttactgaagaaaacattatttcaacaaaccttttgtacctgtttatacagctattttaatttgcaacacattgaatgttaatacgatattccttttttaagattcgatactcatttattaagcctcactccgtttatttgccagtcatttttttctgttccttcagtgaaattgaatgattgcacagaagaagacaacggttcgaatgtgagtgaaaattctgcttcgccgctttcaggcaaataaaagtgctcaccggggttaatcccatctgctttctttaaggtatacgttttacctttctcatctaccaatctacaattcgggctgactcgtatccagtatttgggtatgtaatatgcatagaaatgaacgatagtggctgtgtcagtcaattctacctgcttcacttcaagaatatcggtattggttgattcaaaacttggatggttaacgacttttctattggtgtccccggtgatactcatctcacgctttggcgcatccaaatatctacgcatctttaatttcaggctgcctttaccatagcccgaccacattttcatgattttgccttcgggagagataagaacataattgggaatacctcgaactccatatttagcgtataatccggctgtttgttttaagtcatttaaattctgccaggtcatttcatgttttgccgaagctgccttccacctgcttttcgtatcggagcttagactaatgatagtaagacgctctttatattgttcttgaatctctttcatctctggtaaagccataatgcaaggaccgcaaccgctactccagaaatcaagcaatatatattttccattgaaatcagtcagatgatgaatctttccatccaaatcgaaaagttcggtatctgccattttatctccctctttcacaactgtaggcgggaaaagattaactgtaatttcctgtcctgttatagaagttttttgtgcttcattcattctattatacaaagccagtgtttcatctttataagagaaatttggattgtacttcaccgacatgctcaatttatatagcctgtccatccaaatgtttgatacaggaagttcctgcatcagtttcatttcacgtttgctgattaaagctgaaatactgtcttctttcgcacgtagagccttccgttcggcttccggggcagaacgcagacttcttgctttgatagacaaacgttgatactcatcccataaatcgtgtgaatcttcaataaacctattatattctatttgttcctttacagggctgtctactgtccacgtatgtatcaaggtattcgttccggttactttgattcttgcattaggagttgcataaatctccagcgacatggaaggaaaatcatcattacgggtacacattagagataatttgtctaaaccatcttctccggcatttcgtttgaagaagaaagtaccgttttgtatggtatccatggctactgtacttcctacatttccgtcaagtagaaaaagagaaacaagagttccatcctttacaccttccactttaccttcaatcgtatactcgtgttgtgcttgtgaaacgagactgcctaataaaaagaggctgctaaatagtagttttttcatcatcataatattagaagtaattatacgccacaaggtaaagcttttctttatagagtgttactccttttattgttctttaatatttctgtaaaagaaaggggtacaaaatgccctttcgtccgtctacttgatatgaagaaaaaagaacgaatgaaaatatatactttactgcttggcgcattgtttgtaagtcctacacaggcacaaacaatgcatgattgggagaatcatcatgttctccagatcaatcgtgaaccggcaagagccgcttttacccctttctctgtacagaaaggagacggctcaatctctttagacggaacctggaaattccgttggactcccgttcccaatgaaagagtcatgaatttctatcagataaattttgatgataaagattggacgaattttcctgttcccgccaattgggaagtgaacggatatggtacgcctatctatgtttcggctggttatccgtttaaaatagatcctccacgggtgatgggagaaccgaaaactgactataccacgtataaagaacggaatccggtaggacaatatcgccgcacttttgtattgccgaccggatgggaagtgaatggacagacttttctacgctttgaaggtgtaatgagcgccttttatgtttggatcaacggtgagcgggtagggtatagccaaggcagtatggaaccgagcgaatttaatgtcacgaagtatctgaaatccggagaaaatcagatttcactggaagtctaccgatatagtgacggttcttatctggaagatcaggatttctggcgttttggtggtattcatcgtagtattcatctgatacatacgccggatattcatgtccgtgattatgcggtacgtactcttcccgcatctgctggtaattataaagactttattttgcagattgatccgcaatttagtgtatatcgagggatgaccggaaaagggtatattttacagggagtactgaaggatgcttcaggcaaagaagttgccacattgaaaggcgatgtggaagatatgcttgatttggagcataaagcaagccggatgaatgaatggtatccgcagcgtggcccgcgtaagatgggacgtttgtcagctattataaaatcaccggaaagatggacggcagaaacgccctatctctataaattacacttaactctccaaaatgaagaaagaagagtcgtagaacagatagaacaggccgtgggcttccgctctgtagaaatcaaaaaaggacaactgttagtgaatggtaatccggttcgttttcgtggagtgaaccgtcacgaacatgatccacggacggcacgtgtcatgagcgaggaacggatgcttcaggatattcttttaatgaagcaggcgaatataaatgccgtacgcaccagccattaccccaatgtcagtcgttggtacgagctatgcgacagcttgggattgtacgtgatggacgaagcggatatagaagaacacggattgcgtggcacgctcgcaagtacccccgactggcatgcagcatttatggaccgtgcggtccgtatggcggaacgtgataagaattatccatgtattgtaatgtggagcatgggaaacgaaagcggttacggaccgaacttcgctgctatttcggcatggctgcatgatttcgatcccactcgccctgtacactatgagggggcacagggagtggatggaaatcctgacccgaagacggtcgatgttatcagccgcttttatacccgggtgaaacaagaatatttaaatcccggtattgcagaaggagaggataaagaacgcgctgaaaatgcacgttgggaacggctgctggagattgcggagcgtaccaatgatgaccgtccggtgatgacgagtgaatatgcacattccatggggaatgcattaggaaatttcaaggaatattgggatgagatatatagcaatccccgtatgctgggtggttttatatgggattgggtagatcagggaatctacaagacattacccgatggccgtaccatggtggcttacggcggtgactttggcgataagccgaatttaaaagctttctgctttaatggattgctgatgagtgaccgtgaaactacgcctaaatattgggaggtaaaaaaggtatatgaaccggttgaactgaaaatggaaaatggaaagctgaaagtgacgaaccggaatcatcatatcgatttatcatcttatcactgcttatggacattgtctgtggatggtaaacagaaagaacaaggagaaattacattgccggaaatagctccaggagaaagtggaacaatagatttgccgactttccgttcattgaatcctctttccgattgccaactgaaagtaagcattgttttgaaatcggatgctctttgggcaaaggcaggacatgaagtggcctgggaacaattctgtttgcaaaaaggagatttagcttctgctgatttaattaataaaggaacgcttcaagtggaagaggatgataaatctttattgattagcggacgcggtttttctgttcagtgggaaaagaaagtgaacggaagtatgacctcccttatatataagaacaaagaaaagctggctcactccgatgattttccggttcagcctgtcactcaagttttccgtgctccgacagataatgacaagagcttcggaaactggttggctaaagactggaaattgcatggaatggatcatccgcagataaatctggaatctttccaccatgaaaaacgtgcagacggggcggtcattgtccggattcaaactagtaatttatataaagaaggaaaagtggtgactacttctgtctatacagtcttttcagatggaacgattgatctgaaaacaactttcttgccacaaggagttcttcctgaaattccccgtttaggtatcgcattctgtctggcgcctgcttatgatacatttacctggtatggcagagggccacaggataactatcctgaccgcaaaacatctgctatgatagggctttggaaaggaagcgttgcagaacagtacgtacattatccacgtccgcaggatagtgggaacaaagaggaagtgcattatctgaccctgaccgacaaacagaataaaggtattcgtgttgacgcggtagaaaacgtattttctgcatctgccctgcattacaccgtacaggacatctatgaagaaactcacgattgtaatttaaaaccacgtgcggaaatcattcttagtatggatgctgccgtacttggattaggaaacagtagttgcggaccgggtgtattgaagaaatatgccatagagaaaaaagaacatacgctgcatatccgcatcagtagtaaacaatgatagcaataaataactaacacaattataaaagtaacaatgaaaaaagtaaccactttattatcgaccttagcgttggcaactaccctggctgctcaaaaccttccacaaacggaaaggcaatatctctccggtcacggatgcgacgatatggttgaatgggacttcttttgtaccgacggacgcaattctggcaaatggacaaaaataggcgtaccttcctgctgggaattgcaaggcttcggcacttatcagtatgggatcactttctatggaaaagcatttcctgaaggtgttgccgatgaaaaaggtatgtataagtacgaatttgaagtcccggaaaagtttcgcggcaaacaggtcagtcttgtatttgaagcttcaatgacagatacggaagtaaaagtgaacggacgtaaagttggttccaaacatcagggggccttctatcgtttttcatacaacatcacggattttctgaaatatggcaaaaagaatttactggaagtcactgttgccaaagagagtgaaaatgctagtgtgaaccttgccgaacgtcgtgctgattattggaattttggcggtatcttccgtccggtgttcctggaggtgaaaccagccgtaaacctgcggcacattgccattgacgcaaagatggatggaactttccgtgccaactgctacacaaatatttctaatgacggaatgagcatccgtacacagattttagataaaaaaggaaaaaagataacggaaaccaccgtacccgtaaaagctggaggtgactggacttccctgcaactgaatgtatctaaccccgcattatggacagcggaaactccgaatctttatcaagcacaattctctctattggataaggccggtaaggttttgcatagtgaaacggaaaattttggtttccgcacgattgaagtacgcgaaagcgacggactttatataaacggagtacgtatcaatgtacgtggtgtcaatcgccatagtttccgtcctgaaagtggccgtacgttgagtaaagagaagaatatagaagatgttcttttgatgaaaagcatgaatatgaattctgtccgtttgagccattatccggctgacccggaatttttggaagcctgtgattctctcggactttatgtgatggacgaattgggaggctggcatggcaagtatgatacccccaccggagtacgtctgattgaaggcatgatagaacgtgacgtgaatcatccgtctattatttggtggagtaatggtaatgaaaaaggatggaataccgaattggatggagagtttcataaatacgatccccagaaacgtccggttattcacccgcaaggtaatttctccggttttgaaactatgcattaccgttcttacggagaaagccagaactacatgcgcttaccggaaatctttatgcctacggaattcttgcatggtttgtacgatggcggccatggtgccggattatacgattattgggaaatgatgcgcaagcatccccgttgtatcggtggcttcctttgggtattggcagacgaaggtgtgaagcgtgtggatatggacggattcatcgataaccagggaaattttggagcagacggtattgtaggaccacatcacgaaaaggagggtagctactacactatcaagcagttatggagtccggtgcaaatcatgaatacttctatcgacaagcaatttgatggcaaattctccgtagaaaaccgttacgattatctgaatctgaatacttgccgtttcctttggaagcaagtaaaattcccgttggcaacagatgcttccaatgccgctgttcaagtactgaaagaaggtgaagtgcaaggcagtgacgtggttgctcactcggcaggcattttggatataaaaacaaatatcctccccaatgcagacgccctcttcctgacagcaatcgatccatacggccatgaactttggcgctggactttcccggtcaacaaactgaatcagcagacagaacagctttctcccttgtccagtcgtcctacttatacagagacagaaaatgatcttactgtgaaagcgaataagcgtacattcatcttctcaaagaaagacggacaactgaaaggggtatctgtagataaccgtaagattaacttcgccaatggtccccgtttcatcggagcccgtcgtgcagaccgctcattggatcagttctataaccatgatgatgagaaagcaaaagaaaaagaccgcacatacagcgaattcccggatgctgccgtatttacgaaactggatgtgaaagaagacggaggtaatctggttgttaccgccaattataaactgggcaatctggataaatcccaatggacaattaacccgagtggggatttggctttggattacacctacaatttctccggtgtcgtagacttgatgggtattcgtttcgactatcctgaagatcaggtaatcagcaaacgctggctgggtgccggaccttaccgtgtatggcaaaaccgtattcacggaacgcaatacgatgtatgggaaaacgactataacgatcctattccgggtgagaccttcacatatcccgaattcaaaggatactttggtgatgtttcctggatgaatatccaaacgaaagaaggcactatcagtctgacaaacgaaactcccgacacgtatataggagtatatcagcctcgtgatggccgcgaccgtttgctttatactctccccgaaagcggaatctctgtcctgaacgtgattcctccggtacgtaataaagtaaactccaccgatttgtgtggtccctcttcacaacccaaatgggtaaatggtccacaaaccggacgagtcattttccggtttatgtaaatgaatcatataaaggtatccacattgcgttggataccttttttatttggccttctcatcgatttttcaaggaaaaaggctataagtggggaataatcattatttttgtttcgttttatacattcagattaatgaattctttcctatgtacacaatactaattatagaagatgaaccccgggttgcaagtttgctgatgaacggactggaggaaaatggctatcagacaatggtggcttatgacggactaatggggttacggcttttccagacgcacacattcgatctggttatatctgacatcgttttgcctaagatggacggatttgaactggcgaaagaaattcgcaaaaccaatccccatatccctatattgatgttgacggcattaggatcgacgaacgataaactggacggtttcgatgccggtgcagacgattacatggtgaaaccttttgatttcagagagttaaatgccagaatcaaagtgctgttgaaacgtgtggcgggtaatgcacaggaattgccgcaggaacttgtctatgcagatttgcgtattgaccttcaacgtaaagacgtagaacgaaacagcatatccataaaactttctcctaaggaatacaacttactgttatatatggtagaaaatgccgaaagagtattgagcagggttgaaatagcagaaaaagtatggaacacccattttgatacaggaacgaatttcatagatgtatatatcaactatctccgcaaaaagatagacagggactttgaaccgaaacttattcataccaaagccggaatgggattcatactgaccgataaattatgaaaatcagaacaacgttgactttacaatatgcagggcttacagctgcggtatttttcgtatttgtcatggcggtctactatgtcagtgaacattcgcgtagtaatgctttctttcgtaatcttcaaagtgaagctataaccaaagcacatttattccttaaggatcaagtagatgccaaaaccatgcagtctatttacctgaataatctgaagtttattaatgaagtagaggttgccgtctatacaacagattttaaaatattatatcatgatgctctgcaaaacgatattgtcaaagaaactccggaaatgataaagcgtattttgcagcggaagaacatcaatttctatgtggacgaatatcaggctataggactggtatatccgtttgaaggcaaagactatgtggttactgccgcagcttatgacggttacgggtacgctaaccgggatgcgctaaggaatatgctcattctcttatttatcggaggattgagtgtattagtggttgtgggctatatcctgtctcgaagcactttaaaaccgatacgtaacatcgtgaaagaagcggagaaaatcacggcatcgcatattgataaaagattgcccgtaaagaatgaacaggatgaactgggagaattgagtacgacatttaatgctttactggaacgcttggaaaagtctttcaattcacagaagatgtttgtcagtaatgtatctcatgaattgcgtacccccatggcagcccttacagctgaactggatttagctttattgaaagaacggagttccgaacaatatcagatggctatcggcaatgcactgcaggattctcacaggattgtaaacctgatcgacggattgttgaatttggcaaaagccgactatcaatcggaacagatcacaatggaagaggttcgtttagacgagttgttgctggacgccagagagctggtattaaaagcccatccggattatcacatcgaattagtatttgagcaggaagccgaagaagataatgtgttgacggtaatcgggaatagctatttgctgactaccgcttttgtgaatttaatagagaataactgcaaatattcttccaaccgaacttcgtcagtcttgatagcctattgggagcaatgggcaatcatccgcctgtcagataccggtgtaggcatgtctgatacggataaagaaaacctgtttacactgttttatcgcggagaaaacaagaatattgctcccggaaatggtataggtatggccttgacacaaaagatcatccaccttcacaaaggcgaacttaccgtatcttcccataaggatgagggcactacctttgtggtgaagctcccgcatatctaagaaattctaatcgttttctaataccactctaatcattctctaacagcttcccggtgaagtcctccttacttttgcatcgaattaataaatgcagttagtaactaaaaaaaattagagattatggtatggaagaaaaaactgcgttcaccacagtacacattcaattcagagaaagtatttttggttgccacacaacccggtaagtcaatctattcatacttgcagacaaccaagcttggattaacacagggagaagtgcaagagcgacaatccatttatggaagaaacgaagtggtacatgaacagaaaaagaatccgtttatcctgtttatcaaaacgtttatcaatcctttcattggtgttctgaccgggctcgccattatatccttatttttggatgtattgatggccgatcccggagagcaggaatggacgggagtcattatcatctcatccatggtgctgttcagtgctatcctgcgtttttggcaggaatggcgagcaagtgaggctacggattctttaatgaaaatggtaaaaaacacatgtcttgccaaacgtgccggtgaacaggaagaagagatcgagattacggaactcgtcccgggggatatcgtgtatttggcagctggggacatggttcccgctgatattcggatcatcgattctaaagacttgtttatcagccaggcttcattaacaggagagtccgaaccgatagaaaagtttccggaggtacggggacagcagttccgaaaaggaagtgtcattgaattggacaatatttgctatatgggttccaatgtgataagtggtgcggcaaaaggaatcgtttttgaaacggggaacaaaacctatctgggtactattgcaaagagcctggtcggacatcgtgccactacagcttttgacaaaggcattagtaaagttagctttttgttgattcgcttcatgctggttatggttccatttgtatttttcgtaaatggctttacgaaaggggattggtttgaagctttcatattcgccatatccgttgcggttggccttactccggaaatgttaccgatgattgtgactgccaacctttccaaaggagcgatagccatgtccaaaaagaaaacaatcgtaaagaatctcaatgccattcagaattttggagcgatggacatactctgtactgacaaaaccggtacattgacctgcgataaaatcgtattggaaaaatatatcaatgcagatggcagtgacgacaacagtaaacgtattcttcgtcatgcttacttcaacagttatttccaaaccggtttaaggaacctgatggataaagcgattctttcccatgtaagagatttgagcctggaacatctgaaggatgactataccaaagtggatgaaatacctttcgactttacgcgcagaagaatgtctgttgtaatagaagacaggcagggaaagcggcaaatcatcaccaaaggagcggtagaagaggttctcgatgtctgttcctatgccgagttcaacgggcagattcatcccttgactgatgccttgaaaatcaaagcacagatgattagtgaagaaatgaatcagcaggggatgagggtattggcagtctcccaaaaaagttttatcgagaaagattgtaatttcgccatcgaagatgaaaaagaaatggtactgatcgggtatcttgcttttcttgatcctccgaaaccttctgctgccgaagccattgaacagttatatgcgcatggagtagcagtgaaaattctatcgggagataatgatgtcgtagtgaaagcgattgcccggcaggtaggaattgacaccagtcattttcttacggggatagaaatagaaaatatggacgaaacagcattgaaagaagcggtaaaggataccactttattttcaaaactgactccattacaaaagacgcaaatcatctctctgttgcaggaacaaggcaatacggtagggttcttgggagatggaatcaatgatgcaggtgcattgcgtcagtcggacattggtatatcagtcgattctgctgtggatatagccaaagaaagcgcagatattatcttgttggaaaaagatttgatggtattggaagacggagtgctcgaaggaagaaagacattcggcaatatcaataagtacatcaagatgactgccagttccaattttggtaatatgttcagtgtgatgtttgccagtgcattcctgccgtttctgcccatgatgccgatacatctattgatccagaacttattgtatgacatatcgcagaccaccattccttttgaccgtatggacccggagttcctgaagaaaccccgtaaatgggatgcgtccgatctaagtcgttttatgatttatgtaggtcccatcagttctatctttgatattatcacgtatctggttatgtggtacgtatttagctgcaacagccccgaacaccagacactgtttcaaaccggatggtttgtggaaggtttgttatcacagacattgattgtccacatgatacgtacccgcaagataccgttcatacaaagccgtgccacatggcctgtgatgggactgaccttcttaatcatggcaataggtattcttattcctttcaccgctttcgggcgttccatcggattgacagctcttcctttgagctatttcccctggctgattggaattttactctcttattgcattttgacgcagatcgtgaagaactggtatatcaggaagtttgtgcgctggttatagctttgtctgtttatctcgcaaattaaatgtatatattgtaaaagatttaaaattgagacgaattgtctgtcaagagtttttgcccctaaaattaatttcatatatttaggagcaagaactcttatatatttagatttgcaaactttttaatattcaggcacgatgaaacactattattcctttctgataataacctctttgttattagccggatgcgggcaaaaagaccgggcaaaatctcaattcgaatcatctgtacagacagaagaaagttattcgttagcaaaagaatatattaaagaagctgttatcacaggaaaagtgttgaaccgggatttttatcctcaagaaaagaaattaactctcatcattccatttttttggaaaatggaaaatcaatatcgtacccccatacaagaagacggctcattttcattccgctttccggttcatgcaaaattaagagaagtttccattcgcaattatgcggaacatttgtatatccacccgggagatagcatacacatggaaatagacttcaaagatctttttcatcccaaagtaacaggtgatgcagaaaagttgaatcaagaaatactggcatttacagaaagcgcctactattacatacagaattatagtataaacccgaatttgaatattaaggattttgaggctgaattaaagaaggaatataactttcgtttggagcggagaaacgagtatctgacgaagtataagccaatggacgacgttacgttatttactgaagagttactgaaacaggactattattacgctttgttatcctatggtaaccaatgccagtttaaaacgagaaaagaaatggatcggtatcataaacttctgcctgcaatcaataagctttataataaagggattctttcggcacgtttatatgatattgccgatgaggtagaacgctatatagcttatgggataacatacaaagataaaaaaaatccatctgtagaagagattatgtcggcagtaggagagaatgaactgaaccagtatatatataccaaaatgacagttggctctttgaatgcgaatgatacacttgctttaacaacgaggcacacgcagtttgattcgatcgtaaaaatgccgcatttgcgtgcacaagtgatgcagatatataatcagactaaatcttacctggaaaatccgcaaccagtttccaataatttattatatggtgagtttcacgaaaactcaaagctaaaaacatctatgccttacatggaacccatctataatatacttgagaagaatcacgggaaagttatctatttcgatttttgggctaggtggtgtccaccatgcctggcagaaatggaacctttgaaacaattgcggagtaagtattccaccaaagacctggtcatatattcaatatgtgtaagtgaacccaaggaagaatgggaagagtgcctgaatgagtattcattgaagaaccgggggattgaatgtatttatgcatctgattattttggaaaagataacttacagaaaattcgcaaacaatggaaaatagatagaatgccctattatctgttgattaatagaaaagggcaaattgtagatttcggaactacagcacgtcccagcaatccgcaatttgtatctcgaattgaggaagctgtaaaggacagcaaataatgttgtgagagaaataagacaaataagaaaaggtcaagcaacccacacaaaaaatatcaaatgtttccgatttatattataggaacttatttaactcttttaccaacaaatgaacagtagtagaagattcttgttgtgccggattattcccatcaaattgtctcatgatagttttagcgtgattaatggcttgttcttgtttagaaaacaaaatattgaacattttagaacttacacccgatttctttgtataagcaaatccgagcaaagcgctcaacattttttcgtatctggaacgatgcaacgccccttggtatagattaaaatgcagtaaaaaccaaaattcaaaagcttggttactataagccacttcaaaaccattttgttgtgccaacaggattgcagagttaaaatcattttcaggaaaatcatctttatcaaagaccacccaatgctgattatatgttcgtccctttagcttttcctgctcttttatatggatagccttgtgtactaatgctaatgttcccataccttgaccaagagccttcacattggcagaggtcaaacgaaaagcgttgaaataatcagaaatgtttgtttcacctcacgtacactactgatacgggttatctttctttcgatacgcggatttatatttttcctttttgtagccgtcatagtttaattttcttgggtattaaacaaacgggttaaatctccaacaattggaattgctccatactttcctgataaataatctttttcaaacgaagcatcattacgtactttatactctgccaatgaataaagttcggttgcaccatagcggtctttttgtgtaaaccaaacctgatcccgccggaatatattagcactcaacaaatttgtatcgtgagtagtgaaaattaattgagcattttggggatttgtttcttttgaattaaacaaggcaataattctacatgtaagaagaggatgcattttagagtcaaattcatctattataagacgctttccattatccaaagcatcaatgatagggtatgccagggaaaaatactttattgtaccttccgattcatttttcctgaatgggaaagtaatagttttgacttcatgaccttcctcgtcatattgcgtatgtgtactcacaatagcattatcaattttttcaatattttcaatacctaaatcagcataacgggaaaactctacaattctctgtctcattttgatatcatccagttggatagttgctgtattccatattttttcatcgttagaacctgaaataatagtggtatcattcaaccatttcattatctctactgctgtcggatcattgaattgtgccgcaacagaaagcaataacgcatttgcccttaccattcgtttacctacaagttctttaccaacaacaaacttagtatgaatatcaaaactatctttttcccgatagaataattcaatttccttagctctctttttattggctttttgataaagccattccgagtgtaccaatgaattatcagcttcaaatccataacgatactggttgtcttcatcacagaatatggcttcaaaataacttggttcgttcgcagtaagtgagtttaaccggaaactttctatattaacacgttcgcctgcttgaatatccttcgatgaatttatcacataccacttaaaaaattccaatgcctttataaaattggatttgcctgatgcattagcaccatagactaccgcgctcttcattaatgataatccggaagtacctacactaaagagtatatcttcagccggaacctgtatttctttcaaagccgatgctaccaatgacaatgtagattgttctttgaaagatagaaaatttcctattgtaaattgaataatcatattttaactgctttattcgagattttaccacaaatatactgtttattttatgatataagaagatgtattaggtgaattatattattttatgtctaataacatacattcccgcttataaagaaaaaatattccatcctatatcagcacgatagtaagaggtgcgattagtatagtatatcacgtttcattatggattaaatcaaaatcaatatactttcattatagctttatagctttttcttctttcaccaacttcctccatctttgaaatgccctcatcagcgtttcttcctgtaccagtcctaccatttcgtagtgctctacgaattgttctattgactttttaaacatcactcctttattaaacttattatccaatagaaaggagtataattccgctttcatctccgtttctatttccttttctataatcaatgcactatcgtttccgatatagttatagacttccggattcttcccattacgcggtttgggcagtacaaagcaaatattcccaatttctttccatgaagtattttgcggatgagggacagatagttgatgaaggaagtgataaactggagtaatgtgggagagatggatagggataagtcgtttggaagaagaaggagaggaggaatgagactggttctctggatcgggttctaaactttgtcgatatcggacatacatatatccagccaaatatggcttgatattaattgtaactgtaaccatgggaaaatttttaaagtttgtaataaaaaagtatgtatatacagccctttggactgtgaattccgtttggtttattgagaatattcccatggttatcgggacggaattcttctttttataataaattgatatacagtgtattatagatactgttttttggtttaaaaccaaggaaccgttccttttaaaggaacgacctgtttctcaccgaggaacgccttgttccttttaaagaaacggatgactccttaaaatccgggaacaaaactagttgtaatattccgatatttcaagatggatgattgaagcattaaacaatacgtgtaaatataaataatcgtttttatacatcgtttattttacgcgtgtataaacaaccggtatgtcatgaaagttaattgaatagaatggataataatttaacaatgtttaccggataaacctttttgagagtgttaaaactcgcttcttagatgattatgtggctattttgagtgaaatttcggaatctgtgtgcaatttcagaacgttttattttaatatatatttcttttgtaaatttgcagcatataatatttaaataagcataagcgaataagcaataaatatacgcattttaatgaagatacatgacatagcaattcttttttttatattttggggaagcatttcacaatgtgcggctcaaaagatagcggtaaaaacaaacctactctacggtacatacgccagttcacctaatctggaaaccgaattcgggatttcaccgcgaggtacagtagatctgggtgctggcttcaattggtttacatccgctcattcatcctcaaacaagaaactggtgcattggcttggctcggtagaatatcgttattggacgtgtgaaagattcagcggacatttttggggaatacatatactaggcggacagtacaacatagccggtcatcatttgccgcttctatttggagatgattccggtcactatcgctatgaaggatggggaataggcggaggcatttcgtacggctaccattttcttttaggcaatcgttggagtctcgaagcaaatataggtatagggtatgtcagactacattatgacaagttccgatgcgagacttgtggtgaaaagaccggaacaaaaaatcgcaactatttcggacctactaaagcagcagtttcacttatatttcttataaaataacaaaaacatgataaatctaaaatctatcctatggctgttgcctctgtcactgctcgtttctccattactatatggagaaaacctgccggacaaatggtataaaggaacgatacaagcaacagccatcgaattgcaacaagtgggggattccctacatattcaagtgctttatgaccttgataaaataaaagtcagttccaatcattcgatagaactgataccggtattgattgctgcaaaccaccaactggagttaccggagatttctgtcaaagggcatagtaatttccaaaacctgaaacgtaaactggctttaatgaatacacaggaacgtgatttttaccagtcggaagctccgtactatgttgtgaaaggatatggaataaccgaagaaaaacaaattcgatattccttggtcattccattcgaatcgtggatgaaagatgcacgtttggatataaaaaaggaagtaatgggctgttgcaaaccgggcaagttattatcgacgtttccgcttttcggtaccgtcactttggagcaaccgcctgttccatatcacatcgtcccgcatatcagttatgtccgcccccaagttgaacctgtaaaaaaacgtgagatgtcatgtgaagcgttcctggattttgttgtatcaaagaccatcataaggccggattacatgaacaacccggtcgaactggaaaaaatatcctctatgcttgccgaagtgagaaatgatacaactattaccattcgtggaatatcagtcattggttatgcttcaccggagggttctgtcctttttaacaaacagctttccgaaggacgtgcaaaggcacttgttaattaccttctccctcgtttccctttctctaaagaattatacaaggtggaatatggtggcgaaaactgggaaggactacgtaaaatggttgcagagtctgacatggcagaaaaggatggaattcttcatattatagatcacataccagttgaaataaactaccgaacgaataccagtcgcaagaaatcgttgatgctatataaacagggcaatccttatcggtttatgttgcgtgagtattacccacatctgcgtaaagcgatctgtaaaatagagtacgatgttcagaattttaatatagaacaggcaaaagtgctgattcatagtcggccacaaaatttgagcctgaatgaaatttatttggtcgctctcacttacaaaaacggatcgccggagtttatagaattgtttgaaaaagctgtcagtctctttcctgatgataagattgccaacctgaatgctgcctcggctgcactttcgcgagaagacattgcattagcagaaaaatatcttaagaaagcagagatttctgcaccggaatatgaaaatgccgtaggagtgttgtacctgttgaaaagcgactataaacaggcaaagctacatctaatcaaagctgccgaatccggattggaacaagcatatttcaatctggaggaattgaataaaaaggaagaagatattcgatcaatgactaaactagattattgattttttatttattataattatcattttatttacaacattttaaaatttaacaaagatgaaaacaaaaagttttctattatctacattggtgacttttatgtttgccggctgtagtagtgatgatgcccgggaagggaatattccgagcggtgaactgaatggaaaggcgtatctgtcgctttccctgcaaagtcacacatccactacaagagcagagaatgtagtagaaaaaccgggaagttcaggggaaagtaaagcagggacagtcagagttttattatttgacgaggaagatgtgtgccttgatgtggttaattttgatggtcttactgttgggaatagcggaggaacaagtgtagaggggacagggaccccggaagctgcagctagtgaagctcaattagtaccggagaagactaaaaaagtatttgtggttatcaatccttacaccgacgggaataaagggtggaatttaactgcggatgctgtaaaaggtaaaccttggtctgcaattaacactgccattgaggcagttattgccaacatcgctaccaatgataatttcatgatggcgagtgtaggcgaaggagctggcatagaaggagcattgatgggagtaacggtgcataagccggatggatatactcaagacaaaatagatgcggcaaaaaaagaagcaaaagaccatcctgcagaaatctctgtagatcgattgagtgcaaaagtagagcttgctgttaaagaagcttttactacaaaacctgatggtgccaaatttactttcggtggttgggaattgagtgttaccaacaagagtgtgaaactgtatagtgaacttatcacttatgacaatgctacgaatggagcggtttatcgtcgagataataactatttgcttagcgaacagcccgttattaatactggaaataaaaaaacagacgaagccaatctgatggctgctttcgattatctgaaaaatatagataatgaaagtgacgatatacctgctgttgtacaaacaaatggatcaagtctgtattgtctggaaaatacaatggaagctaaggcacagcaattaggattcaccaccaaagtcgtggtaaaggctacgtatactcctagtggtttgaacgaaaatagtagttatttctcttggaaaggaaactattatacattagacgcacttaaagaggaatatacgaagcatagtgatggtagcgggttgaaagtagatttgcctatattcttaaagaaagcaaagctcgtggctgaaagtgtcactgaacaaagtgccattaatgccgccgtagctgctcttaccgcagacaaatttactgcgaaaaccggtatcatcggacgcttctgtgccgtacgttattatcatgaatctgtatgctattacgatgtcctgattcgtcacgaccaaaatgtaacaaccaaaatggctttaggtagatacggtgtggtacgtaacaactggtatcacctggaacttcagagcgtgagcggtcccggaacaccgtggattcccgacccgtctgatcctgatcctactaatcctacacctccgggtaccgatgatgatgaagcagacgcatacatttctgtaaaaatcactatcaatccatggacttactggacacaaggtgttgatttgcattaatagatgaaaatcaagagacacataaagaaatacataataatccttgccgcttttatggcggcagggattaccggttgcgacgtctttcatgacgatcttgaccagtgtgacctttttcttgaattcaggtatgactataacatggtaaatgaagactggtttgccgatcaggtggaggaagtaaaagtctatgtgttcgatgcagaagggaaatatcttcagacattcatcgaaaaaggtaatccgctgaaaaatacggactatcgtatgctgatcccttatcgactgaaaggctgtacggctgttgtatgggccggaaaaacagatgagttttaccggctatcatcaatgactgcaggtgatccgatagacaaactatccttaaaatacgaacccgataatgacatgagcaacaatcatcttgatgcattatggcatagcggtccgctgcaaatgttttctccggagaacataagcaatacagaaactgtcagcctgatacgtaatactaatgatataacgataggcattacacgaggcagcaatccggtcgatctttcaaaatacgatatacaattgatagcggcaaacagtatttatgactataaaaataattttggagatggaaacaagaacataatttaccacccttgtgcggatgaggaagacaacaaactatctcttcagacccggctccacacgcttagattcgtcaaagatgtcgctatgcctttttccattacggagcaaacatcaggaaaagcgatagacattggaggagaaacaaccataaaccttattgactacttgctgaaaagtaaaccagaaacgatgggggaccaggaatatctcgaccgcagatatcagtgggacattaacatccgcatcggagataaggaagagaacggttatgtagcattaagtatcactattaacaactggacctactggttccaaccaacagatatgtaagccgttttttgaaacgaaattatggcacaattaaggatgaatataactatcaacatacaattttcggcaaatgtcctgcttttgacaatatttgctttgtttgcttactcttgtacaaaggagaacgaaacaacaggcgcacgtatttacgaaggagaaaagataccaatgagtattaaaatgggggcacgcaatactactgctgacgatgatgaagtcataaaatccgtacgcgcaattgtgtttaacgacaaaaacgaattggtatacaacgatgtttctgatgcttccataaacgtagataacatatatatcgctcccataagagcggcacggggatataacaacatttacatcatctgtaacgaaacaccggagcttacggaaaagctcgccgccattacattggaaaatgaaatagaaaaagtgacattctctgctataggtattgttgctccgccacctatgtatggaaatgtgtcacgtgcctatgtggagtctcgtagcgacggaacaaatgccacagttaccatcaataatgttacgacaacggaactgccgattgaggtaaaccgtatggtgtcccgcatcagctttacggcaattaaaaatatcaccaatgaggatgaagattttaaagtaaccaaactgaatgtaaaagtgtgtcgtatgccggtcgccactactataggagaggggcaggcatatacagaaaatgtatggtcggatgatcttactatatcaggaacaggtgaactcgataataacggtacgtatacgataaatggaaataactacaccattcctgataacatagatttcataacgattcctattacttatattcccgaacatctattgtccgaacctcaaaatgcttcacaagcaacctatcttaaaattgatgcacaatgcgttcttaaaaacggcagtacacaggtactgaactgcatctatctgctgaatatcggtcaagagcctcctaaaaatcataacctgacacgaaacaaccattatcggatatacgccaccattaccggcatgggagcaatgggactttatgcggaaatagtggcaatggaggaacatgacatcactatcaactggaaacctattgacggactggttattgtaagtgacaaggctgcagactatgacgccgtagccgatacgtccagaaatgtgaatatatggaatgactttagtgtttattcagggatactgaaagcatatcattcaggaacaggatacaaggatatcctatttaaatacggcagcctgatagccataagttcaccggatgcaaatacggaattcaccccacctaccaatgccactatattgaatgatgtactttggtatccgggctcgtacgctcctttaaatattacggaatgggcggatattccttatctggaaacggataaaatacccacagataatacaattgtccaagtagcagcgggaaagggagacccttgcaaacttgccggactgtccgaatctcaaatcaagactttggggattgtggataataagcagtggcgcatggctactccggctgaaaatctaatattgaaaacggcagcagaaaatgaaagtaattcacagggttatccttcattccattggctattttctccacataacagatatagggatacgaacggtatatcgcaaggagaccgttccaatggatggtattgggataacaatgctaccgtattccatttttccggagaagaaccgcaaaatgcagaaattcaagaaaatatggacaggcaaaacgcgtatatgatccgttgtgtgcgcaatgagatgataaaaagccaactggaagtaggtatcatcagcagtcctacttatcagggaactgaaacgagcggaaatgcttattttggtattatctcgaatattccttactggacagcaacacttatcacagaaggagcatatgtgggttcaacaaccgaatttgacgatttctcatttgtagccggagaaacaatacataccacccatggcggtaacactcaaaacataccgatatacgtcaaacgtaaagaaagtacctcaccgcgttcattcagagtgaaagtggaggggatcggtttggaaggaaaaacagtaaataaaatactcacagtttcacaaagcggatatgatttacgtgcaaaaacgggattaagcagcatgggtaatataccacaagaaggaggatcttatactacgactattaacctcacccctacggacgtaacaatctcttccggaaaactgtatttacaaatcacttatggaggtgtcataaggtgcaaaagtactgaagtacatactgaaccgaataaatatagttatgatgttactataacaattccggaaaacaatagtccaagtatcgttgagcttataggaaatatatatttagagtatgaaaacaacttgacagttcctcttggcagtccgacaattaagcagaacggaacaatatcctccaacaatgagaattgaggtgaaagtatgatgataaatagacacaatatgacaataaaaataaaatataatgtgtatttccggacagcttgcattgctttgttttcactgatattcacaagctgtacaaaagataaactggaagaattcgatccaggaaatgctaccggcaaaatggtgatggtcagcctgaatgtcagccttcctcctgctgtagagccaacgtctgtgagcgggtatgcagttaccaagccattttttagaaacagaaccaatgctgattcgccgtttacagtaattttgggagaggggcaaaaggaatatgcaataaactccaatacccgggtatccgatggtacaacctcgttatataatctttggcttttccagtttcatgagaatggttcgattaacggaaaaccccacaaacttagtgatgtaaagacagctattaatgacatggtaactatagatgttcccttagttgtggcagataatcagactttatacctgcttgtactgggacctaaacttgattatgatatgagtgaagtgggaacacttgatgatcttaagaaatggaatttcaaatatctgactaatgtagaaggacatacccaatcgcttatcacagctgataatgaggtgccatttgccggagaagtgtcaggagtcactgtcgtaaacgttgatgatggtaaacgtggcctggtggaatacaacaagcccgttggttttgtaggaggtattgaagtcaggaggttgatggcacgcattacattacgctataaatttgaagtggagaattaccaattacaaggactgaaattattgaatgtcaacaatacgattcgactttccaacccttcaaaaaataccgcagaggacacttatgccacgcttgaaactgttgattttgagggacccgattccaatgatttctattcggcaacctggtatgttgcacagaattgtcaagggacgatagaaaaaattcttagtgaaaatcaacgctactataaaattgttgataaaacccctgctggggatgcaccgccattgggtacgcagattgaggcatgggcatacccgacaactgcatctgcaactgacgaatatgcaatttaccagatgtatgttggaaataacaataccaataactttgacgtagaacccaaccatttttataacctacgtactaccataaatacagaccttacttcggcaaagaatgacgaacggatcagaatgtataccgccagtcagtatgtagaatttcatgccagccagaatataagcgttggtggaggagcaaaatttgataatactaaatacaacaaagcgggcgtaagctatgatcttgatgcagcctatgatgtacgtcccatagttatacagactcaaggaaggaaagtggaagttgggatatatacggataatctctgtatcacaaaagtttcttctaataagagttggctctatctgtcttcctcatctaattatacagatgcgttcaacaatgttgatgagccgctggctacatctgtcaaagcaaataccatacttcctacacaagtgacgttttatctttacaataatgaatatgtttatgatgaaaacggcaaattggtcaatcccggtgaaaatgataaggacggaaagcgttccctatatatcaaagtgactaccacgaccgaaggtgaaggaggaggagcagtgcaagcttatcatatattcaagatggatcagcgaccggcagtatatgccggacgtttcggaggagagagagatgcagacggaaactatacgatgggattggtacatgacagattgcctgtgcgcggccctaaatatttagaaagtataacaactatgggaacaatacaatatggttatgataaagttgaaacagctgcatattcatacggaaccgataatatggattatgggaaagaggcaacgagaaatttggctgaaaatattagaaatcttccttggaacaacgaaaaaatagctgccccgcaaaaagatgcatctagatatgtattactctatcaatatcaatatccggccagctccttttcagcgagagtttgctatgacaaaaacagggatgaaaatggagacggacgaattgataaagaggagatgaaatggtattttccggcgtctaatcaaatgattggtatgtatataggcagttttttaaacaacgaaagctttccaggtagtgccacaacagaagatggaaatgactatgtcaaaagatggtaccaaggggtaaattctaatcaaaaaatgcaaaccggatcatccagatgtgtcagagatatagatatctcgctcgatactgattaatgatgacatgaactaaaataaataaagaacaaaatgaaaagaataacagtcataatcttcgtatctttttttatcctgctgaaagggtattctcaaaagattgaaatatatgaagaggcgggaattaagtatgcagctattaaatcaatggagttaccggcaaacagggtggaaaatagaagtgaaaaccctgacttttataaaactattcaattatttaagtacaccgacagcggtatggatactgaacccattcaagttaacggtgagaatgtttatgtaaaacggattacacgacatccttacaacgagaataatcaaacaataaaaatcgtttggaaagtatcggaatactttatcatttctccggataatgtatgtagcgatggaaatgatagtgatggaaagaatgtgggagagaaaacaatgaaatgggctacagcgaacggataccttgctacggcaaacacaaatagttacactacggcaagttttgcagtccccaaaggatgtgcaatgtatcgtggaaaggacgggaaagatgaacctgggacatggcggatacctacattacgggagggaagcctaattatgattttttataaggaattagagagaaccaaggataaaggcaccgatttccagccgtttgatttgtcgttagatgataaaaagggaacagcttattggttggcaacagaaaataatactagtgggagtgcatggtctataaaattttatcctatggcagtgaaatatacatcatcccttatctccaagggtagcactctttatctccgctgtatccgggatattccattaaaatgagttacgaacaaaatcatcatcagtttatatacacacttattatcatacaaaatgaaaacgataaaagccgaaatattaatgattgaaggagcaccattccctgccattgaaaaagtatatgatccttcaagtaaaaaatgtaatgggaggattacaccacaagcccccattgtcatcactggacatcacttggatatgttaacatgggatagcgccaatctataccttgtgtcttcagtaaatgacagaatgttgatagaatgtggtgatattcataaatattcggacgataaagtgtatacaaccattcctgatattgatgaaggtgaatattttctggcactgatgattctgatgaaagataaagaaagtttcttatatatctttcccatatctttgattgtacaatttacttaatcaaaatgtcacgattaacatatgtatatatagaagcaagaaataaagacaaacagcataatagcataaattgcagtcaatgaaagataataagccatataggcaaaataaagtatttgataatatatcagaaacagaagagtttaatgtctatactaaaatagacgatttaccgcttaatgaaactcctgcgtatcttgaagaagggataaacgggatatgtacgggaggcagtgcgcttttcaatgtttttggtaataaacgacggattgttcccaatgatctggttgttatttttcctttccagttggctgctgtcacagagattagcgatgacttttcaatgacttttctcaaagtatccaaaaacttgtttatggatacgataagcggagtatgtatacctactcttgattttttcttttatatgcggaaaaatttcagcactccgctatgcgatgaagaatgtcaacgcttcattcacttttgtcatatactgatttatcgtatcaacttgcctcggaacttattcagacgggagtctattatgcaactattacgtgttttctattgggatatctatgtggcttataaaagaaatccgaaagctgccgaattagtaaaatatacccgtaaggaaaaacttttattcgacttcttttgtttggtgatcgaatttcataccgtaagccgggatgttgcgttttatgcgcaaaagatgtgcgtgtccgctaaacaccttacaatggtaattacggatatgagcggccgttcggcaaaagactggattatagaatattccattcttgagataaaggctcttctacgggattcggaccttgaaataaaagaagtggcatcacgtacaaacttccagtcgaattccgttatgacaaggttctttcgcgaacataccggcatgacaccgtctgattatagagaaagaatttttattcagatagatggatcatgatttatagttagttaagtaatatacgaaatactgcctgtgaaggtcgtctattgtttgttttgtttgtgtggtgcaccttcttccgagagtaggaaaggaggtgcacctttttttgattaaagttgttatattcctgatctcataagctaatagtgagtacaaaacagagtgattttcgtctttactttagtaaaaatatagactggaatgaaaagccgactgaaacaacaaatatttgcactttctctattagcatggacagccgtatgccctgccgatgcacagcaaacacgctcacttagggagcaatttcaaaatccgtcagacgaagcaaaaccctggaccttttggtattggatgtatggtgccgtgtctaaagaagggattacagccgacttggaggcaatgaaacatgccggattaggaggtacttatctgatgccgattaaaggtattcatgaaggtgcccaatacgatggcaaggcgcagcagctaactcccgaatggtgggagatggtacgtttcagcatggaagaagcagatcgtttggggctgaaattggggatgcacatttgtgatggtttcgcattggcgggaggtccctggattactcccgaagaatctatgcagaaagtggtttggagcgatacgattgtaaacggaggaaagctgatggctattcgcctgccacaaccggaagcctatgaaagctattatgaagatattgcattattcgctttgccggtagaagacgcagcggacgagatgcaggcaaagattacttgtgtcaatctagccacgacaggaaatgtaaaagctactcaaacagtgaatatggatgcggcaggagtgatccgttcatcctatccatgctatatccagtatgaatacgagcaacctttcacttgccggaacatcgaaatcgttttaaatggtaataattatcaggcacaccgcttgaaagtaatggccagtgatgacggagtgaattatcgtttggttaagcagttggttcctgcccgtcagggatggcagaatacggatgagaattcaactcatagtattcctccgactaccgcccgtttcttccgtttctactggactcctgaaggaagcgaaccgggaagtgaagatatggatgctgccaaatggaagcccaatctgaaaataaaagaattacgcctgcatcgggaagcccgtctgaaccagtgggaaggaaaagccggactggtatggcgtgttgctcaagctaccaaagaagaggaagttgggaaacaggactgctattcactttcacaagtcatcaatctgacagagcaatatactagtcattcgaatggaaaaacattgaccgccactctccccaaaggaaaatggaaattactccgcatgggacatacagctaccggacataccaatgccacagcgggaggcggaaaaggattggaatgtgataagtttaacccgaaaacggtacggaaacaattcgataactggtttgcgcaggcatttgcaaagaccaatcccgaagtagctcgtcgcgtactgaaatatatgcatgtcgacagttgggaatgtggcaaccaaaactggaataaacgtttcgctattgaatttcagaaacgtcgtggctacgatttgatgccttatctacctctattggcaggtattccgatggaaagtgtcgaacaaagtgaaaagattctgcgagacgtacgtactaccatatcagaactcgtcgtagatgtgttttatcaggtattggcggactgtgcgagagaatatgattgccagttttcggcagaatgtgtagctccgacgatggtaagcgatggtctattacattatcaaaaagtagatcttccgatgggtgaattttggttgaacagtcctacacatgacaaaccgaatgatatgctcgacgctattagcggagcacatatctacggaaagaatattattcaggctgaagggttcacggaagtgcgtggcacgtgggatgaataccccggaatgttgaaagccttgttggatcgtaattacgcattaggaatcaatcgtcttttctaccatgtatatgtacataatccctggctggaccgcaagcccggcatgacattggatggcatcggactattcttccaacgggatcagacctggtgggataaaggcgcaaaagccttttccgaatatgctacccgttgccagtcgttattgcaatatgggcatccggtaacagacatcgcagtctttacaggcgaagaagtgccgaggcgttcgatattaccggaacgattggttccctctctaccgggaatcttcggtgcagaacgagtggaaagtgaacgcatccgtctggctaatgagggacagcctttacgtgtacgtccggtaggtgttactcattcagctaacatggctgatccggagaaatgggtgaatccgcttcgtggatatgcatacgatagttttaataaagatgcaatccttcgtttggcgaaagcagaaaacggacgaataacgttgccgggtggagcaagttataaagtattggtactgcctcttgcgcgtccaatgaatctcgaacctgtattgtcatcggaagtgcagaagaaaatcaatgaactaaaagaagccggcattttggtaccttctttaccttatacagaagaagatttttctgtgtatggtctggaacgtgatatgattgtgccggaagatattgcctggacgcatcgtcgtggcgaacttggcgaactctatttcgtagccaaccaaaagaacgaaacacgcacgtttactgcaagtatgcgtattaacggtaagaaaccggaatgttggaatccggtgacgggtgagatgaatattcatccttcctatcgtatcaacggaaaccggacagaagttactctcacattggctcctaatgagtccgtattcatcgtatatcctgcggagggagtacatgaaggctatggagagtcctctctccaactgcaaaaggagaaaaaagatatcgccagagcctctttaaacatagctttggaagcaaaggaatatgctataacttttgcagctaaccaaaaaacgctcacacgaaaagaacttttcgactggagccaagaaacggatgaacagatacgttactattcggggacagcgacctataagaccactttccgctggaaaaataaaccgaataaagaccaacagatttatctgaatctgggaacagtttataatttggcaactgttcgtgtgaatggcgtagattgtggcacaatctggactgctccttatcgtgcaaatattacaggtgccctgaaaaaaggaactaatgagcttgaaatagaggttacaaatacttgggcgaatgcactgacaggagctgatgaaggaaaagcaccgtttgatggcatttggactaatgcaaaatatcgcagggcagagaaaacgttgcttccggcaggattgctcggacctttgagtttttctatcacagaataaaatagatttttaaggcacggattacgcggattatacggtttatgagaatcgtattacataaagtaacaacgcaatccatgtaatccgtacccaattcattataatatagctaaagtatgaaaagttcaattattaaaacaggtacaatgttggcaggttttctgcttgctgcctgcctgtcaacacacgcagaagtaaagctaccggctattttttctgatggcatggtgatgcagcaacagaccaatgcaaacctttgggggatggcgactcctcataaaaaagtaacagtgactactagttggaatggaaaacaatatgcagcaacagcagataaaaatggggcatggaaactgacagtagctactcccgaagcgggaggtccttatactgtgacttttgatgatggaacccaaaagacactgaataatattctgataggcgagctttggctttgttccggacaaagtaatatggaaatgccgatgaaaggcttcaaaaaccaaccggtagaaaatgccaatatggacattcttcacagcaagaatccgcaaatccgtctgtttacggtgaaacgtacttctacattcactccgcagaatgacgttatcggttcgtggaaagaagcaaccccggccagtgtccgtgatttcagcgcaacagcctattatttcgggagactggtaaatgaaatattagatgttccggttgggttggttgtagcagcctggggtggttccgcctgtgaagcatggatgacagcggactggctgaaagccttcccggaagcgaagattcctcaaacggaagccgacataaaatctaaaaaccgtactccgaccgtgctttataacggtatgttgcatccgttaatcggtatgacaatgaaaggagtgatttggtatcagggcgaagataactggaatcgtgcccatacatatgctgatatgtttacccgattgattaacggttggcgtgccgaatggaaacagggtgattttcccttttattattgccagatagctccgtatgattacgggattattaccgaaaaaggaaaggaagtgataaattcggcatatctccgggaggcacaggcaaaagttgaacatcgtgtagctaacagcggtatggctgtattactggatgcaggaatggaaaaaggtattcatcctgcaaagaaacagattgcaggcgaacgtctggctcttctggctttaactaaaacgtatggagtggaaggcgtgaatggcgaaagtccttattataaaagcattgaaataaagaacgacaccgtagttgtcagcttcgaacgtgccaatatgtggattagcggcaagaactgtttcgaatcgaaaaactttcaggtagccggcgaagataaagttttttacccggccaaagcatggatagaacgtagtaagatgctagtgaaaagcgataaagtgccgcacccggtagctgttcgatattgttttgaaaactatgtggaaggagatgtatattgcgacggattgcctttagggtcttttcgttcagatgattggtaatcgcaaataaacaaggtaaaatatgaaaaatatatgaagagattttatctgattataaccatactgtttgttggcgtgtcggctctttggagtcagcatgccaatgtcatttggaatactcccagtcataattcttctgaatctatgccctgtggcggtggagatatcgggatgaatatatgggtagaagacggtgatgttatgttctatgtgagccgtagcggcacattcgacgaaaaaaactgccagttaaaacaagggcgtgtacgtctccgcctgtcgcccaatcctttcaaagacgctaaagattttcgtcaggagttgaagctgaaagacggatatgtagaaatcgcggcaggaaacacacagatacaattttgggtagatgtttttcatccgattatacatgtagaggtaacaaatgcacaaccgttgcagactgaagtcttttatgaaaattggcgctatcaggaacgacctgtcagaaaaggagaggggcaacagtgttcctacaaatgggctcccccgaaaggtactgtgacggaggccgactttatttctttagacaaaattactgattcaacaggaaaggctgaaataaataggacttcaataaagaggaaccaacttctgttttatcatcgcaatcccgaacagaccgtttttgatgtagttgtagctcaacaaggaatgaacgaagtaaaatctcaaatgatgaatcctttgaaaaacttgacttttggaggaactcttttgggtgaaaacttagaatttgcaggcactgcggatgatgtatatgccggaacagactatcgtgcttggaaattccgttcttccaaagcagcccggaaagaacatatctgtattgtgttacatacagaccagacagaaacaatagaagaatgggagcagggactacaaactgctttacaaagaatagcccccaaaggtaaagtttcattgaaaactatcatacaggataaaaaacagacccgttcgtggtggaattccttttggcaacgcagttttatcgaagcagaaggggaagcaaaagaaataaccagaaactacacccttttccgctatatgctgggatgcaatgcttatggcagcgtaccgactaaatttaatggcggactatttacctttgatccttgccatgtcgatgaaaaacaatctttcactcccgactaccggaaatggggaggtggcacaatgactgcacagaatcaacgtttagtatactggccgatgctgaaaagcggagactttgatatgatgccttcccagtttgatttttataaccgcatgttgaaaaatgcagaactgcgaagccgtatatattggcaacatgatggagcttgctttagcgagcagatcgaaaatttcggtttgccgaaccccgcagaatatggtttcaaacgaccggactggttcgacaaaggattggaatataatgcctggctggaatatgaatgggatacggttcttgaattctgccaaatgatattggaaacaaagaactatgcaaatgctgatattaccccttatttacctctgatcgaaagttcgctgacattcttcgacgaacattaccagcaactagcttcccgccgaggacggaaagcgttggatggcaacggacatctgattcttttcccgggttctgcttgtgaaacatataaaatgaccaataacgcaagcagcaccatcgccgccctgaaagtggtattagaaacatacggagagaaagaggagatgctaaaagcaatacctccgattccattgcgatacatagaaataaaagatacgttgaatccgactattgctccggtcttgaagcaaacaatttcgcccgccgtaagttgggaacgaattaataatgttgaaacgccacaactttatccagtgtttccatggcgtatttatggagtaggaaaggaggatctggatatagctcgtaatacctacttttatgacccggatgccatcaagttccgttcgcataccggatggaaacaagataatatatgggctgcctgtttaggcctgaccgaagaagcaaagaaactatctttagccaaattatcgaatggaccgcatcgtttccccgcattttggggaccgggatatgattggacacccgatcacaactggggaggtagcggcatgataggacttcaggaaatgctattgcaaaccaatggagaacaaatactccttttcccggcatggccgaaagaatggaacgtacatttcaaacttcatgctccgggcgaaacaacagtagaagccactctcaaaaacggaaaagtgacggacttgaaagttttaccggaaagtagaaaaaaggatattgttataatgattgaaaaggaaaaatgataattttgcggagtgccctgaaagggcttaattatatagcgtagggcaacgccctacgtaaaaacgacaatctgaatttgcgccctgaaagggcataattgtatacagttccgccctttcagggcttgtggctggtgtgtttttttcgtagggcgttgccctacgctatataattaagccctttcagggcaccccaataaatatataattgtaaggctttcagcctaaccgctaaaatctcatttaaccgctaaattcccatataacgaatgaaatatataaataaagaattatgaataaaagaccatttatcatcttatcagcttttctgttgctattttccttgatagaaaaagggcaggctacagaaacttaccgtcccgagacatcggttgccggattcatccagcttcccggtagcgggcgacaagtctataatttcaatccgggatggcgctttttcagaggcgatgtccggggagcagaagcggtaaacttcgatgaccgttcctggaatgtcgtttccacccctcataccgtagagttgatgccggccgaaggaagtggatgccgcaattatcaaggaccggcttggtaccgtaagcactttgtcctccccgctgaaacaaaagggcaacgggtagtacttcattttgaagcagctatgggcaaacagattctttatctgaatggtaaacgcattcaggaacatctgggaggttatctaccttttactttagacttgaccgccaatggcgtacaagccggagactcctgtctgctcgctgttttcacggacaacagtgatgacaaatcctatcctcccggaaaacgtcaatatacattagactttgcttatcatggtggcatttaccgtgatgtatggatgattgccaaatctccggtagctattactgacgctattgattcacaaatcgttggcggtggaggtgtcttcgttcattttgataagatcagtgaaaagagtgcgcaggtatatgtaaacaccgaagttcagaatgacgacgcccgttccgagtcagtcactgtagaaacgactttgacagacgcggatggaaaagtaatcaaacgcagttcaggaaaactttctttaaagccgggagagaagaaatccatccgtcaacagatggaagtaaagaatcctactctttggtcaccggacacaccttatttatatagggtacaatcacgtattaaaaaaggaaataaatccattgacggaggcattacccgtgtcggtattcgcttggcagaattccgtggtaaagacggattctggctgaatggcaaacctttcggacaactggtaggagccaatcgccatcaggattttgcatacgtaggcaatgccttgccgaactcacagcaatggcgtgacgccaaacgtctgcgtgatgccggatgtaccattattcgggtagcccactatccccaagaccctgccttcatggatgcctgtgacgagctcggtctgttcgtgattgtcgctactccgggatggcagtactggaacaaagacccgaaatttggagagttggttcatcagaatacccgtgaaatgattcgtcgtgaccgtaatcacccttccgtattgatgtgggaacccatcttgaatgaaacccgctatccgctcgattttgccttgaaagctcttgagattaccaaagaagaatatccctatccgggacgtccggtagctgctgccgatgtccattctgccggagtgaaagagcattatgacgttgtttatggctggccgggtgatgatgaaaaagaaaacaagccggagcaatgtatctttacccgtgaattcggggagaatgtagacgactggtatgctcacaacaataataaccgtgccagccgcagttggggagaacgtccgttactggtacaggctatgtctttagcaaagagctatgacgagatgtaccgcacgaccggtttatttatcggtggcgcccaatggcatccgttcgaccatcagcgtggttaccatccggatccttattggggcggcatttatgatgctttccgtcagaagaaatatgcgtatgaagtatttcgcagccagtcgccggccagtctccaacacccattggcagaatgtggaccgatgatattcattgctcatgaaatgtcacagttctccgataaggatgtagttgtattcacaaactgtgattcagtccgtctttctatttatgatggaacgaaaacctggacgaaaccggtggttcatgccaaagggcacatgccgaatactcccgttatattcgagaatgtctggaacttttgggaagcacgcggatatagctatactcaaaaaaactggcaaaaagtgaacatggttgccgaagggattatcaacggaaaagtggtatgcactcaaaagaaaatgccttcccgacgttccaccaaactacgtctttatgtagatactcaaaaagtgaacctggtagctgacggttccgactttatcgtcgtagttgctgaagtaaccgatgatagtggaaatgtgcgccgtctggcaaaagagaatatcgttttcacggtagaaggtgaaggagaaatcatcggagatgctactattggcgccaatccccgtgcggtggagttcggctccgctccggtgttgattcgttctacccggaaagccggaaaaataaaggtgaaagcccgcgtacagtttgagggcactcaagctccgacagctactgaaattgaactggaaagcgttcctgcagaacttcctttctgttatgaagaacaggcttatgaaatacaaaggacaacaccgtccactctcaatgtaaacccgggcaaagaatcatctgaaggaaaagtgcaactgacagaggaagaacgccaacgggtgttggatgaagtagaacgtcaacagactgaatttggaactgaaaaatagtacgataaaagtgattagcaggttagtgataagtgattagcagggtgatctgccaacttgttttttatatgttactaaagcactattcaaaaaaaaagactatctttgagtacgtttaattccaattatagccatcaatgagaaaacggaatattctaatactattactatccatgataggcatgtatgcttttgcctatccaaatatgattgtagaacactacacggctgaacgtggtttgcctaataatatcgtaaactgtacattaaaaggacaagacggatttatctggtttggtacctggtatggactatgcagctttgacggaagtaaattccgttcctacgataatcatgacggcttttattccacagacattccgccgcgtaaaattcagcgcatcgtagaagataagaatggttttctgtggattaagactatcgaccgtaaactctatctgttcgataaacggcatgagagctttcatgccgtctacgatgatgtgaaagaatattccgagaacattcagattatcaagattcagacgaccgaggacggcgacgtactgttactgacaaaagataaaagtcttttgcgtgcgtacaccgacaaggaaggtaaaataacgatgaaacaattgcatgattcgcgtcctaacgtgaacgtgtacgacatgcgtctgaaacacaacatattctgcgaaacagccgagtttatcaattggatcggtatggattatcagattctgtccctacggaaaggggaagcgctgaaagacaaacctgccgactttatacagaaaaaggtatctgccaacccggatcagtttacttgtgcctcttataattctaaattcttatggttgggagacaagaaaggccacatttatagcattgatccgcaaaacggagttgtcaaccgttacgagataccggaaatcaaacagccggtttctaatctgctggtaacggaatccggtctgatgtacattaccaccaatgaaggagcatacgagtacaatatcggctacaagcagttgaccaagctcccctttaccatccccgaaaaagacaatggaattatattctatgataaatatgataaggtatggtttcaggagggtaaccaggcattgacctattatgaccccctaaacaggagtcatcatcgctttacattccctaatcagaacgcaatcggcaattttgaaatgcaggatgccggcgaacagggcatgttctttatgactccgggaggggaaattcttctattcgatagggagaaactggaaatgacccgtatcaaccaattgaagcctttctccgacgatcttcccaatcagcttttcttccatcttctgctggataaagatggcatcctttggctggcatctacgagcagcggagtatacaggcttaatttccccaagaagcaattccaactgttgacagaagtttctccatctccggtagtgcccgagagatcgacttcctggaaccagggaatacgtgctctcttccaagcgcaaaatggggatatttgggtaggaacccgctggcaagctctgtatcgcctggatcgtaacggacaagtgaaacaaatcttctcggataagaactatctattgggagccgtatatcatattatggaagacaaagacggtaatctttggttttccaccaaaggaaacgggcttgtcaaagccgaaccggacatgaattcaccgcacgggttgcgttttacccgttatatcaatgaccccaagaatccgaattctatcagtaacaacgatgtgtactttacttatcaggacagccaggggcgcatttgggtaggattactgggaggaggtctgaatctaatttccgaagagaacggagcaattacctttatacataaatacaatggcttgaaacaatatcctgcatacggtctttatatggaggtacgtaccatgacggaagatgaagacggacgtatttgggtaggaacaatggatggcctgatgtctttcgacggacatttcactgcccccgaacagatccagtttgaaacgtaccgccaggtcagcgaaaattcaaacgtagcggataatgatatttatgtactctacaaagatactgattcgcaaatctgggtaagtgtattcggaggcggtttgaataaattagtccgctatgataaagaaaagcgtgaaccgatcttcaaatcatacggcatacgcgaaggaatgaataacgatgtagtcaagtccatcgtagaagataaaaacggtaacttgtggtttacaacggaaattggcttgtcttgcttcaataaagctaccgaacagtttcgtaactacgacaaatacgacggtttcctaaatgtggaattggaagagggtagtgccctccgtaccttgaatggagatttgtggattggtacccggcagggaatcctgacattctctcccgacaaactggaaacattgcatacgaactacgatacacgtattgttgactttaaagtttccaaccgcgatctgcgtagtttccgcgaatgtccgatcctgaaagaatccatcacatacgccaaagcaatccggctgaactacaatcaatccatgttcacgattgaatttgccgcattgaatttctataatcagaaccgggtatcttatcgatatatactcgaaggatatgaaaaagaatggcattataacggaaagaaccgtatcgcttcttataccaacgtacctcccggagactatacattccgtgtagaaaccgtagatgaagccaatccggagctggtttccaactgtacattggctattactatccttccaccgtggtggttgagctggtgggcaacccttatttatgtaattctaggtttggcagctctctatttcagcctgcgcctggctttcttcatgctcaaaatgaagaatgatatttatatcgagcaaaaggtatcggagatgaaaatcaagttctttaccaatatctcccatgaattgcgcactcctttgacattgataaaaggtccgatacaggaactaagagaacgcgaaaagctctctccgaaaggattgcaatatgtggatctgatggagaagaacaccaatcaaatgctgcaattagtgaatcagatccttgatttccggaagattcagaacggcaagatgcgtttgcatgtgtcattaattgattttaatgagatgatagcttctttccagaaagaattccgggtactttccgaagaaaacgagatcagttttactttccagttgccggatgaaccgattatggtatgggcggacaaggagaaaatgagcattgttatccgcaacatcatatccaacgcattcaaattcactcattccggaggaagtatttatataactaccggattgacagacgacggtaaacgttgttatgtacgggtggaagataacggagtaggtattccacaaaataaactgaccgagattttcgaacgcttctcgcaaggagagaacgcgaaaaactcctattatcagggcacaggtatcggattggcactttcaaaagagatcgtcaatctgcatcatggacagattcgtgccgaaagtcccgaaggacaaggagcggtgtttattgtggaactcctgatggataaggaacattaccgcccgtcggaagtagacttctatgtgggagatacggagacagcccctgtttcggtagaacaagatcctgttgcaaatgccatatccgaagacggtacggaagaagaaccggaaatcgacgcttcattaccgacccttctgttggtggaagataacaaagatctttgccagttgataaagcttcagctggaagacaagttcaatatccatattgccaataacggagtggaaggtttgaagaaagtacatctgtatcatccggatattgtggtgaccgatcagatgatgcccgaaatggatgggcttgaaatgttgcaatccatccgcaaagatttccagatcagccatatccctgtcattatcctgactgcgaagaatgatgaaggcgccaagaccaaagcgatcactttaggggcgaacgcctacatcaccaaacctttcagtaaggaatatctattggcacgtatcgaccagttgcttgccgaacggaaactgttccgtgaacgaatccgtcagcaaatggaaaaccagacaacgaccgaagaagacagctacgaacaatttttggtaaagaaagacgtacagttcctcgaaaagatacatcaggtcattgaagaaaatatggacgacagtgactttaacattgacaccatagcatccggtatcggattgagccgttcggcattcttcaagaaactgaagagtcttaccggcctggcacccgttgacctggtaaaagagattcgtttgaataaatctatcgagctgattaaaaatacggatttaagtgtttccgaaattgcttttgctgtcggattcaaggattcgggatattatagtaagtgtttccggaaaaaatataatcagtcccctcgcgaatatatgaatgaatggcggaaaggagagagataaccgattacaaaatgctttcttaatcgtccttttagaaacctaattaagattcgaaagaatgaacaacattaagaaagtattatcagcgtggatgctggttgcctgtgtactacctgtggcagcccagtatcctgtaattccggactcggtaaaagcaagaggagcaaaacaagaagcggagtttgaacggaaatcggatgcggcatgggaaaaagctttgccgacagtgttagaagaagcaaagaaaggtcgtccctataagccttgggcctccaaacccgaagatttgataaaaagtaatatcccggctttccccggcgcggaaggcggaggtatgtatactcccggtggtcgtggaggtaaagtgatcgtagtcacttcgctggaagattccggccccggaacattacgcgaagcctgcgaaacgggaggtgcacgtattattgtattcaatgtagcgggagtgattcgtttgaaaagcccgattagtgtacgtgccccttatgtaacgattgccggacaaacggctcccggagatggtatctgcgtcaccggacaatctttcctgatcgatacacacgatgtcgtgattcgtcacatgcgcttccgccgcggtgcgcaggacgtagctttccgtgatgatgcagtaggagggaatgcggttggaaatattatggtagaccattgctccgccagttggggattggatgaaaatatgtctatctaccgtcatgtatacaacagaggggcagacggacacgggctgaaacttccgacggtaaacattaccatccagaattctattttctctgaagcattggatacctacaaccatgctttcggtgcaaccatcggtgggcataacagtatgttctgccgtaatctctttgcttccaacatcagccggaacagttcggtaggtatggacggcgactttaacttcgtcaataatgttgttttcaactggtggaaccgctccgtagacggaggcgatcacaacagtttctacaatatgataaacaactatttcaaacccggtccgatcactccgataggtaaaccgatttcttatcgtattctcaaaccggaagcgggacgtgacaagaacagaccgctttcattcggaaaagcatacgtaaacggaaatattatccatggcaatgccaaagttacaaaagataactgggacggaggcgtacaactgaaagaagaggtggacgtcgcaaagtttctgccgctaattaaatcggacgaggctttcaaaatgccaccggtaactgtaatggataccaaaaaagcttatacctttgtattagataatgtaggagctaattttccgaaacgtgacgcagtagatgcacgtgtcattaagaccgtacaaacaggaaaggccatttatgcgaaagatgcaccggagtttgtctctccttacgtgaagagacggttaccggctgattcttacaaacaaggtatcatcacagatattcgtcaggtaggcggactgcccgaatataaaggtgaagcagcagtagactcggacggcgacggtatgccggatgcttgggaaattgccaacggattgaatccgaacgacccggctgacgccaacatggactgcaacggtgacggatataccaatattgaaaaatacatcaatggtatagacaccagaaagaaagtggactggacagacttgaagaacaattatgatacattgtctaaacggaaaagtctgttgtaaccggatgaaaagagattaaagtttattgtaatgaatatacaagtaagaacgatccttttaggattattgagcattgggtttgtgcaaagttatgcgcaaacctttgctttacaggttaagaatgaccagatcacttacctgaatgatgatcggggaaaccggattctcgatttctctacatgcggatataaatcctccgaacaggatattccttctgtccgcaatgtggtatttgtaccctggaaagccggagataatactgcgcgtattcaacgtgccattgattatgtagcttcgctgactcctgacgcttccggttttcggggagccgtattactcgatcagggagaattttccctgtccggcagtattcgtatctccgcatccggaattgtattgcggggtacggataaagaaaaaacaatactgctgaaaaagggcgtggacagaggtgcgcttatctacatggaaggaatggacgacctgaatgtacaagacacattgaaggtgctttcccactatgttccggtaaacgcgagaacattggaagtcgcttcgggtgtttctctgaaaaaaggagaccgcgtcatggttacccgtccttccggcaaagaatggattgcctctttgggttgtgatatttttggaggaggtatcagtgctttgggatggaaagaaggtgacatggatctgacttgggacagaacagtcagtgaagtaaacggcaaccaggtaacactggatgctccgctgaccgtagctttggatgctaactatggaacttcttccctgttgacttatcaatggaacggacgtattcacgattgtggcgtagaaaatatgacactgatttctgattacgacaagcgttatcctaaagacgaggatcattgctggacaggtatctccattgaagatgcggaaaactgttgggtgagactggttaatttcaagcattttgcaggaagcgctgtaattgttcagcgtacaggttccaaaattaccattgaagactgtatctcgaaagaacccgtttcagaaatcggagggatgcgtcgttgcactttccatacgttgggacaacaaactttatttcaacgctgctattcggaacagggtattcatgactttgctgccggatattgtgcagccggtcccaatgcttttgtacaatgtgattcgtatgaatctttgggattcagcggttctattgatgcctgggcatgcggactgttgtttgacgtagtaaatatcgacggtcataacctgacttttaagaatttgggacaagataaaaacggagccggttggaatacggcaaacagcttgttttggcaatgtaccgcagcagaaatcgaatgttatgctccggcaaaagatgcgatgaaccgtgcatacggttgttgggcacaattctccggtgacggtgaatgggcacagtccaacaatcatgtacaacctcgcagtattttttatgctcaattgggagaacggttgaataaagaatgtgcagaacgtgcacgtattcttcctagaaatacaagtgcaaccagtagtcctacagtggaagtagctatggaactcgctaaagaggcatataaaccacggttgacgttggaacattggatcggtgataataagtttactccttcggtggcatcaaccggagtaaaatcaatcgatgatattaaagagaaaaagagcgctgcgcttgcaaattcttcttcttcttcttcttctgctgctgctaaattattaacccaaccggaagtaactgtaaccaatggacgtattcagatgaacggtgctctattggttggaggcagtcataccaccccttggtggaacggaaagctcaaaaccaattatctaaaaaaggcaagtccggccatcacccgctttgtgccgggacgcgagggattgggattaaccgaccgcattgattctgtagtcgactttatgaaacagaaaaacattcttgttttcgatcagaattatggtctttggtatgaccgtcgccgggatgaccacgaacggattcgccgtcgcgatggtgatgtatggggacctttctatgaacagccatttggtcgtagcagtcagggaacagcatgggaaggattgagcaaatatgatttgaaacgccctaatgcatggtactggagccgcttaaaagaatttgcggaaaaaggaaataaggacggactgctgttgttccatgaaaactatttccagcataatattttggaagccggtgcgcattgggtagattctccatggagaagcagcaataacatcaatcagaccggatttcctgaaccggctccatttgccggagacaaacgaatctttgtggcgggtatgttctatgacattactcatcctgtccgtcgtgaactgcacagacaatatatccgtcagtgcctgaataacttcgcagacaattcgaatgttattcagttgacaagcgccgaatttacaggcccgttgcacttcgtacaattttggttggatgtgatagctgaatgggaaactgaaaccggaaagaaagcaaaagtggcattgagtacaacgaaagacgtacaggatgcaatccttgcagattccaaacgtgctgccgtagtagatattattgatatccgatactggcattataaaacggatggaatctttgcgccggaaggtggaaagaatatggcgccacgtcagcacatgcgtaagatgaaagtgggaaaggtaactttcacagaagcatataaagctgtcaatgagtatcgtcagaaatttcctcaaaaggcagtgacattctacgcacagaattatccggctatgggatgggctgtgtttatggcaggaggttcatgtcctgtaattccgtgcacagataaagcgttcctgaaggatgcagcagcaatggaagtggaagaaacaaatacggatgagtacaagaaaatggtaaaatctgatattggaagtatcatttattccaagtccggaacagaaattcctgttcaattatcgtccggaaagtatgtattaaagtacattcgccctgcttccggaaagattgaaacaataaataagtcattgaaaataaatagcttatataatctaaaggtaccagataagaaagaaggtatttattggttccataagttataaagcagagaatcccgttgaagaccattcagcgggatttttgctttttattggtaatttctagtaaaagagtgttataaaacatgatacttgttttttcaatccacaaaccagattttacctaacgttgcggtcgatactgcttagttttgcaacatcaaatcaatcgaattaatgctatgatggaacagactaatcattcaaccgacactttactcgcttcttttcaagcgggaaacatggcagctttttcacagctgtataacttgcacatcaacgtcctttttaattacggattgaagttgaccattgataaagagttactgaaagattgtattcatgacatcttcgtgaaactctatacaaagaaagatgaattaggcaccattgataatttgagatcttatttattcatctccttaaagaataagttgtgtgatgaacttcgcagacgtatgtatatgtctgatacggcagtagaagaagttagcatatccactcctacagatgtagaagatgattatatggaagaagagcaacgcaagaatgaattttcattggttagacgtctgctggatcaattatctccccgccaacgtgaagcgcttacattatattatatagaagaaaagaaatacgaggatatctgcgagattatgaatatgaattatcagtctgtacgcaacttgatgcatcgcggattgacaaaattgcgtagtctggcgagttaattttagtaaaaaggtaaatgggttgagtacatagacaggataacgccgtcctacttatgtaaacgcttaaaaaggatgcgatatgtgctcaaaggtaatggattttttgacggatgatgattttatcaactatgtgctgggtgtaactccgcaatcagcttcccaatgggaaacttatttcagagagcacccggaagagatggcagatgcagaagaagctaaagctgtattattggctccggcaaatgtagactgtgacttctcaatagttgaaaataacgaattgaaagataggattattagtagtataaaagatttttcgggtattttgtagataggttagtatagttaagataaagtagttaggttagttaaggcattaaaagattgacgcggcctttcacaggaggtttaattttaaacactgtgaaaggctgcgttttttatttgttctattcaggtttctcgccagattcctgaatatcgaaagcactactgaaactgactattaatacgatacatccgcccaatatgccgataagcatataagcgatacggatatcgaacgcctgcgagatggcaccgataagcaggggagcaatcagcgaacctataaaactgatgcttgacagaatggtaagtgcaatactgaccggtgtttttgatttggctcccacgaagctgtacaaagtaggcacaatgcaggaaatacccaagccgaccagcatgaaacctaaagaattaatgattactttcatagccatagattcgaaaactcctcctaacagggcagaaacaaaaaagccgatacagataaagctgcccgccagttgcaggactttcttctttcccaaaagctgataagcatagttagtcaggaaacggcccgttgccatcataatcataaatacaagaaaaccgatttgcaatgatttaggtacatgaaccactgattcgaaataaacggcactccagtcgaacattgcactttctacaatcagcgcaaacagtccgacaagtcctaactgcaaaagcaacatttccggtttttgaaataacaggcgaaaaccattgggagctttggctgtatttctttcctgcgtctttgtatcagaaacttccgtttcctgcggtgcgctctcctgcaaatatttccgcccggaaagtacaattataaggatgatgataaatatcagtgtataatgccagatgggggagactcctgccaaaatcattacgaagccgataagtgctcctgcacatgcccccagactccatcctccatgaaaagtggccataatggttttaccatagatacgttccacctcaatgccttgtgtattgaatgatatatcgcacaaattccagcacaccccgaagcagaagagcagaaagcctaaaagatagacctcatgagccagcccgatgcaaagcagggatgaagcgtatcccagaatactgacctgtaccatgctccggcttcctaacttcgaaacaagatagccggccaaggggatcgcgacaaactttccgacaggaatcataaataaaatcagtccccagtagaaagcataatttgcggcaaaaacgtctttgaaatcagggattcggctagcccaacttgccatacaaagtccttgagcaaagaaaaaagtcaatatggcaaaacgtattctctctttaggatgcgtaaattggttattcatgcattttttatttttaatcgcggcaaaggtatctattttttttgtacttttgcgcccgatttaaaaatatcatattcatgaagacaggcgaatctttattatccataggtaaatttattgcagaatattcagcccatttaatgggggccggagtacacacctcgcgggtggtacgcaacacaaagcgtattggagaggctttcggactagatgtcaaattaagcgtatttcatagaaacatcattctgactattatagacaaagaaacaaacgaggcttgtaacgaggtcatagacattcctgcacacccgatcagttttgaacataattcagagttaagcgcattaagctgggaagcagtagacaatcatttgtcattggaagaactgaaagacaaatacaagaagattatttctgctccgcggatacatccgcttttcgttttactactagtaggatttgccaatgcgtctttctgcaaattgttcggcggtgatttaatttcgatgggaattgtgttctcggctaccattacaggattctacctgaaacaacaaatgcaggcaaaaaagatcaatcactatgttgtatttatagtctcggcttttgttgcttccctgtgtgcttccaccgcgctgattttcgacacaacttcggagattgccatggcaaccagcgtgctttatcttgtacctggggtgcctttgattaatggcgtgattgatgtagtagagggatatgtattaacaggatttgcccgtctgacagaggcttctttgttgattgtcagcatcgctatcggactttccttcacattattaatggtaaaaaatagtttaatttgatatgatagcacttgacattcttacggatggattttttgcagcagtagcaggtataggatttggtgcgatttccgatcctcctttgcgtgcattcaaaatgattgccatactggcagcactgggacacgcctgtcgtttttgtttgatgacctatttaggcgtggatattgccacaggttcgttgtttgccggattagtcatcggcttcggcagtttgtggttagggaaaaaagtatattgcccgatgacggtattgtacattccggcgttacttcccatgattccgggaaagtttgcatacaacatggtattttcacttatcatgtgtctgcaaaatgtgaatgatccggataagctggacaagtttatgtcgatgttcttctctaatactctgatagcaagcacagtgattttcatgttggcggtaggagctacgttcccgatgttcctgtttccacatagagccttttcattaacaagacattaaaacgaacttttatggagattttttggagaacaattgcatattataattcagctacctggctgttacagatagttatcattctgattggtattgcattgaccggattgcttatcggccgaccacgtccgtgggtgaaaatggcgatgaagttctatatgataggtctgtatacgtggatttctctggtctactattatatctactgtgaagagcgtagctataatggggtgatggctatgttttggggtgtgatggctatcatttggatatgggatgcgattacgggatatactaccttcgaacgtacccacaaatatgatttgctgtcttatgtgctgttagcaatgccttttatatatcctttggtttcattggcacgcggactttcattcccggaaatgacttctccggtcatgccttgttcggtagtggtgtttaccatcggattgttattgctgtttgcgcaaaaggtcaatatgtttttggtattgttcctttgccactggtcactgatcggattatccaaaacttatttctttcagattccggaagatttcttattggcaagtgctacgatccccggcttgtatcttttctttagggagtatttcctgaataatctgcatgccgacaccaagccgaaagcaaaatatatcaattggctgttgataagcgtttgcgtcggactggccgtattgctgactactaccatgtttttggaattggttccgaaaggttaatccggaaacatagaagatattcaaatcaaaaaaagaggccgttcaaaaaagccttgatcttataaaatcgtccttactacagtctatcgtagtaaggacgacttttcttttaggaactttgggaacagtttcttttatatatcgtatcgtttacttaattgcgtagaatatccgtaaggcatactgcatcactgcatcaggcaaccattttttactcttcgcaaacaatacctgtatccagggacctactttcgtccgaaaaggaggattggtacgttccactatcttacagatggcagcacccaacttccgcggatggcatccattacgttcttctttttctataatctctaatgatttcagaaaactttctccataatcggcatctagtcttgtctgttcggagatattccggttatcagtaaatccggtgttgaaatctcccggttctactacacaaacctttatatggaacggataaacctctaaagccaatgcttcgctatatccctccactgcaaatttcgaagcagaataaaatccctgataggggattcccattacaccaccgatagagctgatattgataatcttaccttttcgtgcctttcgcatagatggcaacacagctttacacatgttcactacgccgaagaagtttgtattcatttgtatattcacttcttcttcagtagcaagttccaatgcgccgccgatacctattccggcattattaatcaatacgtcaatccgtccttgctccgatagaatctgctctacggcctgacaaacggaaagggaattggtaacatcgacaacaagcatttttacatgattcatgtcttcggaaggtttccggcttgttccataaacgatgtgcccttgttccgataacatttgagcggtaatcttgccgaatccggaggatgctccggtgataagtatgacttgtggttgcatattttttatttgcggtatggtactaactgctcaattatcatttctgcaagatagcagtcatttcttcccgccaatccgcaccattcttcggttggaacgtttcaaatccgagttccttgcctatatggatattcgaagcaccgtcatctacaaataaagtttcggaaggaatgatattacaatcatttaccataaattcgaaaatttcgggcgcaggtttcgtatgaccgacctcataagacaaatatagtttgtcacaataatcattcagcggctttttcttcgatgagaaatcagagctgcatgcccacgacataacgaaaggattggtattacttaaaatatatacatgataggactttctcaattccaatatataattgagtttatttagattcacttcattgaaaaagcccagccatgcctgtttggtttcctccatcgtcaatggacggccacataaatcccccagttgtttccgaaactcatccgcgcttagctttccttcttccagttcttgaaagatgccggtctggtgatatttatccagccgggtatcagcatctgccagtcccagtttgataaatgcctgaaccgctttgtcacgatcaatatctacaatcactcctccaaaatcaaatacaatgtttttaatcatgatatataattttcttgtttgctacaaagatacggcttatcttcttaattaatagcccgcatcggcttgatatttgtcaaaaaaacatagtgacgctatcctgtcaggatagtgacgccatttagcaaggatagtgtcactataagaacaggatagcgtcactatattttgtgtaacttatagaagcataaatgccgattattttttatatttgcaaatccaatcaatcctttgcaaagacaaaaatagagttatgaataatcttcgaattttattgtatatgatgctcctttcactagctgcctgccatccggaaggaacaagcgtgaagcaagggctggacaaggctgcgcaactgatggagcaggaccctgatacagcatccattattcttgagactattcagtcaagccaaatgaatgaggctcaactggcagagtataatttattgtgtacccaactcaacgaggacaaaagtattcctcattcttctgataagcaaatcaggcaggcggcatcttattatgagaaaaatggcaatgaatatcaaaaatccaaagcatattattatcttgcctgtgtggaaagtgatctggaacagaaagaggaggcagaaatccactttaagaaggcaatcaagcttgccaaggaaacagaggaatacgatcatctggcaaaaatctgcaaacgatgtagtctttattatcagaaatacggtaactttgatgaggcactggaaatggagagaaaggcttacgccagtcagttgatgttgaatgacggtaaaagcgattcttcagtaattctttcttctgctttaggaatgtttggtgtgatgtctttgttacttgggctactctggaagaaaaatcggcacgcactttcccaattggatcttttcaaagaagaaatactgaaaaaagatgttgaatcggataagctgattttgcaatgtaaccatctcgaagagaagtatcagtctcttcaactacatatctatgaaagttcccccgttgtctcaaaagtacgacagtttaaagaacggaatgttttgtcttctaaaatcccttctttctccgagaaagactggacagagttactgcgacttcaggaaaacgtctatggacttgtatctaaattgaaagaaataggtccgaagctcacagaagaggatttaagggtatgtgcttttctgcgggagggagtccaacctgcttgctttgctgatttaatgaaactgactacagagacgctgacccggagaatctccagaataaaaacggagaaactgatgttggcaaattctaaagagtcactggaagatattgtgaaatcattgggggatctttcattttgtgcaagaaattaattattatctggtaatgattcattatctccttactacatttaaggcttttcgttgcagagattaatgttttttggtacagaaattagtaatcttttatgcagtcgggtagttgtcccgttataacgggacgatgggcatcctatagggtgacaaatgtcactttataaggtgatatttgtcattctgtaatatgattatctgtctttagaagaatgaaagtcattaaagatacgaaattaaatagcaaaaaacaagagtggcacttgtttttcctaatatcccaatagttttttcatatttgatacattgtcatttttatgccatttactttactatgccattattaatttgtacctaatttatcctctgtctgtttttgtctatctcttcacttttattattattgattatcaacatattatcattgacgaccgtccgtatccgtccggtaaaaaatgcctattttagcagtatgtcctgtaactttgcaaataaaaaagtacagaacaatgagcaacttattatttaaaagatggaatgatttcggtgggtggctggtctttctgatagcagcatttgtgtatgggatgaccatcgaaccaaccgcaagtttctgggattgtcccgaatttatttcttgtgctgaaaaattacaggtagggcatccgccgggagcacctttctatatgcttgtcggcaacctgtttacccagtttgcttccgatgcttcgcaagtgtcgggaatggtcaactttttaaatgcactattgagtgccggttgtatcttgtttcttttctggagtattacccgattagtgagagccttgcttgtgggcgatgaacggaaattatctgttatggatgttattatcattctgggagcaggttttgtgggagctttagcttatactttcagtgatacattctggtttagtgcggtagagggggaggtatatgccttctcttctttcctcacagccttggtattttggatgattcttcgctggcaggatgaagcagattctgtgtccggtgaccgctggattatcctgatagcctatattatagggctttcaatcggagtgcatttgcttaatctgctttgtattcctgccattgtattagtgttctattaccaaaaatatcagactctatcactcaagggagttatcggggccattgcattatccggtattcttattgtattgattctttttgtttatatacccggaatggctgatgtaggaggatggttcgaattattctttgtcaatgtgatgggattacccttccagtcaggattgatcgtctttctgggtttggtcctgtttttactgataggagccatttatcggttcagaaaacgcatcgtgaataccggtttgtggtgtttactcatgctcaccataggatataccacctatgcggtcatactcattcgtgccaatgctaatacgccgctcaatgagaatgcaccggatactattttcacactcaaaagctacctgaatcgcgaacagtatgaaagtgctcctttactttatgggagaacctatgcgtccgaaccggagtatgtgcccgaaggagactattacaaggtaaagacagaaaaaggtagtgccatctatcggccggataagaaagaaggcaagtataaaattattcgctataaggaagacgtgtgctacactcaaaatatgttgtttccgcgaatgtggaatgatcgttcggccgcttcttacaaaggatggtccggtggaggtgcgaatgaggctcctacacaaaaagagaacctgacttattttatcacataccaactcaattacatgtactggcgctatttcctatggaattttgtcggacgacagaatgatattcaaggaagcggtgaaccggaacatggtaactggattacaggaatttcctggcttgataatctgcgactgggggatcaaaaacttttgccggaatctttgcgtgagaacaaaggtcacaatgtgttctatggcttaccattattattaggattactcggtatctattggcaatggacacgtggaaaaaaaggcaagcagcaattcagtgtcttatttttccttttctttatgacgggattggctattgtgctctatctgaatcagactcccggacaaccccgtgaacgggattatgcgtatgcaggttcgttttatgcgttcgctatctggattggaatgggagccgccggatgctgtgacatgcttcgcaggaaacaggcaaaaatcctcccagtcggcttacttatgctgctttgcctgtttgtccccatacaaatggcaagccagacttgggatgaccacgatcgaagcaaccggtatacctgtcgtgactttggtgctaattatctgatgacacttcccgacaaaggaaatccgatcatattctgtaacggggataatgatacgttccccttgtggtataatcaggatacggaagaagtacgcagagatgtacgtatctgcaatttaagttatgcgcagaccgactggtacatttatcagcaacaatgtcctctgtacgatgctcccggactgccgatcagttgggatcaaaatcaataccaggaagggaagaacgaatatgtggctgttcgtccggaattgaagaaacagatagaagcattgtatcagaaacatcccgaagaagcccgtgatagttttggaaatgatccgtatgaaataaagaatatcctgaaatattgggtgttcgcagagaaacaggaattccatgtgatacctaccgatacaataaatatttatattgataaggatgcagtactccgttctggaatgatgttgcctgaagccattcgtcatttaaaaggggaagaactaagagatgcaataccggataaactgtctatttctctaaaaaatatacgtctgttgactaaagtggacttactcatgctcgagatcctggctaactgtaactgggaacgtcccctgtacatggctatctcggtaggcaactccagtaaactgaagtttgatgactactttgttcaggaagggttagcattccggtttactcctttcaactataaagaatggggagacgtggaagaaggcaatggatatgccatagatacggagaagctctacgagaatgtgatgaacagatataaatacggaggattggatactcccggactttatctggacgaaacaaccctgcgcatctgttattctcatcgaaggctctttgcgcaactggctaaagaattggtgaaacaaggagacgacatccgtgccagaaaagtattggaatatgctgggcaaactattccggcatataatgttcctgaagtatacgagagtggttcgtatgatatagccaccgcttatgcttccataggagaaacgcagaaagcgaccgatctattgaatcatctgatagcagaatcggaaaattatatcgactgggctttctcattgggagataaccggatagggatggttcaacaggattgtttgtataggttctggcaatggaatcagtgtaatgaattactgaagagtatggataaagagagatatgaacagagtaatcagcaatttgaaaagaaatatatgcgctttactcaactaatgaattatcacaactaaactcaaagaatatgaaatcgaaaagaataagagaagaagaaataaaaacagtattgggcaaaagaaattacgtcatcttaattatcggctctatattgattatcataggatatatattaatgagcggtgaggggagtacccttgccgcctataatcccgatatatttagtggaacacgcatacgtattgccccattattgtgtttattggggtatctactgaatgtattcggtattctttaccgtcctcgtcaaaggggaatttaatctttcaatagaggtaactgattgagcatatttctaagtttgattgccactcgtggcataggttcggcaactgtaagtcctaccagatcatattcggaggatatatcattaatgatacgaactacttcttcaatcttcatgccgttaggctcaatgcctacggcagcgattatctctgctgggtccaatacatccatatcgaaatgtataaccaccttcgaaaccccggtacttttcagccattccataatctttgtacgatcattggcaacttcctgtggagataatcctttaattcccagctttctttgtcgttcctgcataccctcatcccatgagcggagtccgacaatcagggctttggaagcatctgtttttcccggaagtaattccataatttcttcatctcccattcccaaacaagctgttagtgccattgcatgataacccttatattcatcataaggcagattgatgtcgggatgcgcgtctatccagacaatagctacatcatccgggtatctattgattaaataagtaaacggaacaacacttacagaacattctcctcctaaagtgacaatccggtccggatgattctctttaagcagatcgaacgcagctttagtttgtttcagtatgacactgcgtgcactgatacctttttccgtcgctctgtcatttatatccagtgaaaccggaacttcgaccgtattctgaccggtctgtggggctaaatagttcaataactgtgctcccagatagtagcctctggatgaatcttccgccggaatatcaggcatccaatgatctacaattcctccttgccattgaggatagataaaacgaagagttgattttttattttccatatttacattgtttgttactttttcttgtgcattcattgaaacgactccaacgactaatgcaagtgataataaatactttctcatctttttgaagcaaaagtagggaatacctgaaacatcggcaagtagggacgaattattcatatactgataaatttagccctatactacattttggggttattatttttgtttttgtagtgatatccttatttttgcagaaaagcagaaaactatgtataagaagaaaattccttttgatattgattgtgggataaagattacgatggaagtgatcgggggaaaatggaaaagttgcatcattcaggaattatgcactggtccgaaacgtcccagcgagctgcatcgtttatttaccgaggcaagtccccgggtcatcaatcaacaactgaaagaattggagatgcacggcattatcagcaaaaagatattcatggagcttcctccccattcggaatatgctatcaccgaattgggaaagacgctgattcctctgattgagcaactggaaatctggggtgatagctttcgtccggagatgaagagaatcttgaaaatagaataaatctttctaatatcattaatatttcaaaaaagaccatctatctaaaataaattattgcttcttttgtcctaatgaaatgaaaattgggagatagtatgaataacaacattgatataaaaacgctggaggcctttcaggatgggaatcacaagacctttgagactatttttatagcatactacaacaaaaccaaaacattcattgacggatatataaaatcagaacctgatgcggaagagctgacagaggatttatttgtcaatctttggatcaaccgtcattcgattgatacgtccagatcattcaattcttatttgcacaccattgcaagaaatgcagcaatcaactttctgaaacataaatatgtgtgtgatgcctatctgaacaataatcaagaaacaggatatagctctacttccgaagaagaccttattgccaaggaattggaaatgctgattgacgaacttgtcggaggaatgcccgaacaacggagaatgatttatacattgagtcgtaacgaaggattatccaatgccgaaattgccgaacgcctgaatactaccaaaagaaatgttgaaagccagctaagtcttgctttgaaagaaatacggaaggttatttcatgttttctggtatcactattatagcattatattttttttcattctgctttataaaaaaacttccactttcttattgagctttttgccactaaactgtatatatagtaaagtgcagcaaaaatgaagaaaagtaatatcagtaaaatcatcaaaatgttcctctccgcacgctttccatccgaaacggaaaagaaagtgcagaagtggatcattaaagaccaaaatcagcaggcgaaagcaaaagcttcattggattattggaatgaattggacgtagaagccgattcgagcacttatgtctcattggaacgggtaaacttaagaacaggatataataaggagcatctgaccaacgtagcttcttatcagaagtttgcccgtgttgccgccgttattgttcctttgtttttattggcaggaggaatgttctactatctttctccccgaaacgaaatgatagaggtatctgttgcctatggagaacagaagcgtctaattttgccggacagttcggaagtatggttgaatgcgggaagttccattttatatccggagacttttgccaaaaataaacgtcaggtcattctcaacggtgaagcttatttctctgtcaaaaaagatactgtaagtccttttattgtagaaacctcccaactttctgtgaaagtgcttggaaccagattcaacgtgaaagcttatcctaatgatgaaaaaataacgactacattgactagcggtaaggtggaagtgagtattcatgcccaatctccccatatactaaagcctaatgagcaacttacatacgacaaaaaaacatcagatatccatatatcagtgatagatacgaatgatacaaactcttggatggtgggaaaactggtctttaccaatgccagcgccggagaaatattccgaactctggaaagacactataacaccacgattgataatacagcaaatatccctgcatccaaacgatatacagtcaaattcctgaaagatgaaagcctggatgaaatactgaatatattgaaagatataatcggctttgattatcagcagtatgaaaagaaaatagtattaacccaataataaaaagaaacagcctatgaataaaaagaaccgggaagcagcttgagaccctcttcccagttctgaaatgtctatcctcattcaacaagtgacgtaaaatgaagtatcaacatacaaatatagaataatgaatcgaataaatacgaataaacaggcggctaagcttgccatttttttattttttacttttctctctctcacaactgttgcacagaataaagaaaccttaattccgcaacactattacaaatataactttttaagtacctgagcaacaaaaagttgctcaggaatttgccatgtcagatttttcacctatcttagtgttgcaaatcaaaatatgtatcaaacccgacagacatggcaaaggtagcaattaaatccgagaaactcactccttttggaggaatattttcaataatggagcaatttgactccagactctcatctgtaatcgactcaaccctcggtatgagatgcaggctgtatggttatcaatacagcgaaatcatccgttcgcttatgagcgtttatttttgtggcggctcatgcatcgaggatgtcaccactcatctgatgtaccacctttcgcttcatccgacacttcgcacatgcagtgccgacacgattcttagagccataaaggaactgacccaggataacatttcctacacatccgacactggcaagacctacgacttcaacacggcagacaagctgaatacactgctcctcaattgcctattgtccacagggcagctgaaagagggcgaggggtatgacgttgacttcgaccaccagttcatagaggctgagaagtttgatgcgaagcctacatacaagaagttccttggttatcgccctggcgtggcggttattggcaacttgattgtcggcattgagaacagcgacggcaacacaaatgtccgtttccaccagaaggacacgctgaagaggttctttgaaaggtttgaacaaaacaagcttattatcaaccgtttcagagctgattgcggctcgtgttctgaagagatagtggaagagattgctaaacactgcaagaccttctatatccgtgctaaccgatgcagttcgctctacaatgacatctttgccctcagaggttggaagaaagtggaattgggcggcattgagtttgagctggcctccattctcatcgagaaatggaaagggaaggcataccgtcttgtgattcaaagacagaagcggatagacggcgaactcgacctgtgggaaggagaatacacctaccgctgcatccttacaaatgactacgagtcttccgagaaagagattgtcgaattctataacctccgtggagggaaggaacgcatcttcgatgatatgaataacggattcggctggaacaggcttccaaaatcctttatgggagaaaacacggtgtttcttctgcttatggcactcatacgcaacttctataaattcatcatggcgaggcttgacgtgaagaggttcggactcaaagcaacaagccgcatcaagacgtttgtctttaagttcatctctgtgccagccaaatgggtcaggacatcaaggaagtatgtgctgaatatctattcatgcaacaatgcttatgccaatgtgttccagaatgactttggataacaccgacaacttatagtcgtgattttgcgtattgcctcaagtcgcatggtggggtaaggggcatttatatgtctttatggtgacattcgatgcactgtgccccctttttactaacgatgcagattcttttcgcttctgtatcatattaggcgcgtagttgcggatttgaggagaaaaaaaaattaccatacaaaataaaagtatctcactaaaagaggcttttgcacaaatagaagtacaaacgggatatagcattgcttatgaacagtcaaatctggatatagaaaagaaacaatctttatctcttaaaaatgtagccatcgacaaagctatgactcaactattgaaggaaaccggatatgtatataagataaaaggatatcatattattatttcttcgcaagataacaagcaaaagcccgccaacaatgatacacaaaaactgactcaaaccataagaggaatcgttgttgactccaaaaccaatacgcccatagaatatgcctccgtttgtatagcagaagatccctcacggggaggttcgacggatggacggggaaactttcggatcaataatgtcccggtaggtcgttataatattcaggcatcttttatgggatatcgtccaagtatcatcagcgaagtttctgtcacttcatctaaagaagtgtttgtagaaattcctatggatgaaaatgtgcaggatttggctgaagtacttgtcaaaccggaaataaagaaagaccggaccgtcaacccgatggccatcacaggaggacgtatgattagtatcgaagaagcgtcacgatttgccaatggctttgacgatcctgcacggttaagttctgcattcgcaggagtagcgggagatgtcggcaccaatgcggttgctatccggggaaatgccccacaatttacacaatggagattggaggggattgaaatacctaaccctacccactttgccgatctatcaggcttgggaggaggattcctgtctgctttgagtacgcaggttatcggcaactccgatttctacaacggagctttcccggcggaatacagtaatgccctatcaggtgttttcgatatgcatctacgaaatggtaataatcagaagtacgaacatgcttttcaggtcggactcatgggagtagatttagcttcggaaggtcctatcagcaaaaaaaggggaagctcttatctggtgaattatcgcttttccactacttcactggcatcgggcaatgacatcaacctgaaatatcaggatttagccttcaaactaaattttcccacacgtaaagctggaaccttttcgatctggggattaggattgatagacagaaataaagcagatgttttggaacgttccgaatgggaaacgatgggagaccggtcgtcgggatataataaactggataaactggcaggtggcttagcgcacaaatatgtactggatgaaaatacttatatccgttcttctctatccgctacctattccaaagaccgttcattggcggacttacataccgacgacgctattattaatgtagcagatattcagaatagcagatggaatttagtattcaatttatatctgaataagaaattcagtccgaggcataccaacagaacagggattaccattacggaacttaaatatgatcttgattacaaagtcagcccttatttgggattaaacaaacctatggaacaaatatcgaaaggcagtggagaaagtacagtcctctcggcatatagtagttctgtaataaacttgagcaacaatctgacaaccagtttaggggttaccggacaatattttactttaaacaagaactggtcgatagaaccgagagttgcccttaaatggaaaataaatcctgcacattctttagcagcagcttacggcttgcatagccgccgggaaaggctcgactattactttgttgaacagataatcaatggtaaaaaggaatcaaaccggtacctggacttctcaaaggcacatcatttcggattcacttatgactggaatatcaatcagagcctacatctgaaaatagaaccctattatcaatacttgttccacataccggttgaggaaaactcctccttttcgattatcaattacgaagaattctatttagaccgcatattgacaaacaccggaatagccaaaaactatggaatagatataacactggaacaatagatgaaaaacggcttctactatatgattacagcttcattattcaaatcgaaatataggggaggagaccgtatctggcgaaatacgagactggataaaagttttttagtgaacctgctcgccggaaaagaatggatggttggcagactcaaacagaatgtattaagtgtaaacggccgcctgttctttcagggaggaggacgctatacacctgtggatgaagaaaaaagtcaggaagaaaaagacatcgtttttgacgagagcaaagcatatactaaacgattcaatccatctataaacggtgatgtttcgatcagcttccggatcaataagaaaagagtatcccacgagttttctctgaaaatactgaatgtgggtatgcgcaccggaatgcatttctatcaatacaatgaaagaacgagtgtagtagaagaaaaagacggagcgggtctgattccgaacatcagctacaaaatttatttctaaataactgaacaagaaaagggtttgttcacacaatagacttgacacccaacaggcaactgctttcagtaattatggtataacaatctgtaatatatatactaacaagctctctgaatacctgtatatttgctgcgtgaaataatttagttatgaattatatgcgtatcatattcaagaaattcaaagcacgtatgattgtaggatgtatattagctgtaatagcattgctggcggtgtcagtcattgtttttatcaatcaagccagtttcggcagaactccccgtggggaacggctggaaagagtcatgaaatctcctaattacagaaacggagaatttaaaaatcagcatgaaactctattgatgacttccgacaggggacgttttagcggaatctgggagttcattttcagaaagatagacggtttgcgccccgaacaggctgtcaaagcaataaaaacagatttacgcaagattggccgtaatgaagaaatattggtatggttcggacattcatcttacctgattcaaacgggaggaaagcgaatattggttgacccggtattttgtatggcttctcccgtatcttttgtcaacaagccattcaaaggtacggaactttatacaccggatgatatgccggacattgattatctcgtgattagtcacgatcattgggatcatttggattacaacacagtcaaaaaattaaaagaccggattggagcagtgatttgtccgttgggtgttggcgaacatttcgaatattggggatttgataaagagcgtctgatagaacttgactggaatgaagacgcaaacctcgctccgggctttatgatacattgtttgcctgcccgtcatttctccggtcgcagacttactaccaaccagtcactttgggcttctttcctgctagaagctccttcacaaaagatatacattggcggagacggaggatatgatacgcattatgcagaaataggcaaccggttccccggcatcgacctcgcaattcttgaaaacgggcaatacaacgaagagtggagcttaattcatctgatgccccaatatatggcacagacggccagagatttaaaagcgaaaagagttctgaccgtacatcattctaaatatgcgttggccaaacatcgttgggatgaacctctcaaaaatgcagaagagatgaagaataaagattctctgaatgtattgattccggagattggagaggtcgtggcattagaaaaatagtgctttacccaatcggctaaaggttttcccgtctgttatcagtgaaattggtaaaacattctgtaatttgtatagttgaaaaacaaatttccctgattaactttgcaaagttgaaatatagatggttcaatcctgacagttttagacatttagatataactactataaattgaaaattaattagtttatgctacgtactatcagacttacaaccgccattgtgtgctttacacttattaccctgctctttctcgacttcacgggtacattgcacacatggttcggatggttggcgaaaattcaatttctgccggctttattagccttgaacataggtgtcgtattgtttttagttgtacttacattcctgttcggacgtatctactgctctgttatttgtccgttgggagtgtttcaggacattgtttcgtgggtatccggcaaacaaaagaaaaaccggttccgttattcaccagcaatgaaatggttgcggtatggcgttttaggagtattcattattatgatggttgcaggattgaactctttggctatcttgctggcaccgtatagtgcttatggccggatagcttccagtctttttgcaccggtctggcaatggggaaacaacctgttggcgtacttcgccgaacgaatggatagttatgctttttatgaggtagatgtatggataaagagtctttcgacgatgctgattgccattgttacccttgttgttcttttcattctggcgtggcgcaacggacgaacctattgtaatacgatctgccccgtaggtactgtattagggtttatatccaaatatgcgatattcaaaccggtaattgatacttccaaatgcaatagttgcggtttgtgtgcccgcaattgcaaagcatcgtgtattaatccgaaagctcatgaaatagattatagccgttgtgtgacttgtatggattgcatcggaaagtgtaagcatggagccattacatacacaagacggaaacctaagaacgaaatagctacgagcgaagatacgaaagcaaagtctgtcactactgaacaggtagacaatgcccgtcgtagcttcctttcagcatcggccatttttgcaacaacttctgtactgaaagcacaagagaaaaaagtagacggaggattggctactatcgaagataaaaagattccccaaagagaaaaccctatctatcctcccggtgctttaagcgcacgcaatttcactcaacattgcacagcctgccaattatgtgtctctgtttgtcccaaccaggtattgcgcccatcggacaacctattgacattgatgcaaccggaaatgtcatacgaacgtgggtattgccgtcccgaatgtactaaatgttcggaagtttgtcctgccggtgctattcatctcaccagtcttgccgagaaatcagctattcagatcggacatgccgtatggattaaagagaactgtgtacctttgacagatggaatggaatgtggcaactgtgcccgccattgtccgacaggtgccatacagatggtagcttccgatcctgaaaaaacagattctccaaagattccggtagtaaatgtagaaaaatgtatcggttgtggggcgtgtgagaacctttgtccgtcccgtcctttcagcgctatttatgtgacaggacatcagatgcatagaattatttgatctaaatcagtataagattatggaagataaaaataagaaagatataaatagaagagatttcattaagattgtaggtattagtgcagccacgtcgacagggctattatacggatgctcttcaaaaagtacttcctcttcaagcagcgcaacaggagaaggagaggtgcctaacgataaaatgacttaccgcacgtctccgactaccggtgaccgtgtttcactcttgggatatggttgtatgcgttggcctcttaaacctgctcccaacggtaatggtgaagtaatcgaccaagatgccgtgaatggactgattgattacgcaatcgctcacggagtaaactatttcgatacatctccggcatacgtacagggcttttccgaaaaggcaacgggtattgcattgagccgtcacccccgtgataaatattatattgccaccaagttatccaatttctctcccgatacttggtctcgtgaagcatcgctcaagatgtatcataaatcgtttgcagacctgcaggtagattacattgattatatgctgcttcatggcattggcatgggaggaatggaagcccttaaaggacgctacctggataacggaatgcttgactttctagtgaaagaacgggaggcaggacgtatccgcaatttgggattctcctatcacggagatatcgaagtgtatgattatctgctttcacggcacgatgaattcaagtgggatttcgtacagatacaattgaactatgtagactggaaacatgcaaaagaaaccaatacccggaatacggatgctgaatatctgtatggagaactgcataaacgaggaattccatctatcatcatggaaccgcttttaggaggacgtttatccaagttgaacgacaacctggtagcacgactcaaacaacgccgtccggaaagcagtgtcgcttcctgggctttccgttttgccggttcatttccggacattctgactgtgttaagtggcatgacttatatggaacatctgcaagataatctccgcacttattctcctttggaaccgttgacagatgaagaaaaagagtttctcgaagaaacggcacaattaatgttgaaatatccaacgatcccttgcaacgactgcaaatattgtatgccatgtccgtatgggttggatatacctgctgtgttgttacattacaaccgttgtgtcaatgaagggaatgtccccaagaacgggcaggatgagaattatgcgaaagcccggcgtgcttttctagtcggatatgaccgtagcgtgcccaaacttcgtcaggcaagccattgcatcggttgtaaccagtgtgtggcacactgtccgcagaacattgatattccgaaagagctgcatcggatagatcaattcgtagaacaattgaaacaaggtactttataaaagaaaagatggaagaattaatcaatttactacatacgggaggatattcctgtactattgccaacaaaggagaaatccgtactttcactcaacgcggtgtggctgatatctatgatttactaacccaggaaccggagtttcttaaaggagcctcgattgctgataaggtggttggaaagggagctgccgccctgatgattctgggaggtatcaaagagttatatactgatattatcagtaccaaagctctggagttgcttcagaaatcagatataaaagttgattttacagaggaagtaccttttatctggaaccgtaaccatacagaaggatgtcctgtagagacaatgtgcagcgaagtggaatcagcagaagaaatattaccactgatccgcgattttctggaaaagatcagaaataagaagtaaaaagaagaaacttgaaacacgaaataaagtatgaaaagaaatacagcttgtttattcctgttcggtagcttgctttccatctcgggaatggcacagactaaaaaggatagcatacaggccggaagaaattatatgattgatgaagtcgtagtcaccggaacacgtaatgaaaccgatgtgcgtcatcttccgatgaccatttccgtagtcggcaggcaacaaattgagaaaagatatgagccttctcttttgccgttgttaacggagcaggtaccgggattattcactaccagtcgtggcatcatgggatatggcgtatctaccggagctgcaggtggcatgagcttgcgtggtatcggtggtagtccgacagcgggattattggtactgattgacggtcatccccagtacatggggttgatgggacatccgatagcggatgcttatcaatctatgatggcagagaaagtggaagttttacgtggtccagcatctgtactttatggttcgaatgccatgggtggtgtgattaatattgttacccgtcggcaacaggaagaaggtgtgaagacgaatatgcaagttgggtacggttcatataacacgttgcagactgaattttccaaccgtgtcaagaagggacgtttcagtagcgtcgtaaccggatcatataatcgtacagatggacatcgtcccgatatggggttcgagcaatatggtggatacgcaaagttaggttatgatatcagttctttctggaaagtatggggagatgtgaatgtaacccattttaatgcttccaatccggggactatccaagtaccactgattgacaacgattctcgtatcactcgtggaatgacatcgttcgctttggaaaatcattatgaaaagacttcaggaggtttgagctttttctataactggggacggcataaaatcaatgatggctatcagataggaaaagaaccgcaaaaatcacatttcaactctaaagacaaaatgctgggtgtatcatggtatcagagtgccactttctttaccggtaatcgtttgaccgtaggatttgattatcaacacttcggaggtgaatcatggaacaaagtactggctacgggtgaacatactccgggagtagacaagcaaatggatgagtttgccggatacgttgatttccgtcaggatatcagcagttggttctcactggacgcaggtattcgtgtagaccaccattcacacgtaggtacagaatggattccacaaggcggactggcttttcatttacccaagaatgcagaacttaaagcaatggtcagcaaaggataccgtaatccaaccattcgtgagatgtatatgtttcctcctgccaacccggaattgaaaccggaaaaactaatcaactatgaactttcctattcacaacgtctgctggaaggggcattgtcctatggaatcagcctttactatatcaatggcgacaatctgattatgtcaaacggactctttcctccattgaatatcaattccggagagatagagaattggggagttgaaacgaatataggctaccacatcaattcacactggaatgtgaacgccaattatagctggttgcacatggagaatcccgttcttgctgcccccgaacataaattgtatgcaggggcggactatacttccggacgttggagtatatcgactggagtacaatatgtgaaaggactttatacttctgttgtaaagggtagcgagcaacaggatcattttgttttatggaatcttcgtgggaattatcgtgtctgccgtttcgctaacctcttcataaaaggagagaacctgctggcacagcgttatgaaataaatgcaggttatcccatgcccaaagctacgtttatgggtggtattaatttgaacttttaaataataaaatgatatggaatcaactactgtaaaactctattcgctgaattacggcaatgtgagaacttatctggcagcctcgttattcatcgttggcaacatcctttttccccaattttttcatctcataccgcaaggaggaataacctggctgcctatctatttcttcacactgatcggagcttataagtacgggtggaaagtcggtctgctgactgctgttctttcccctattatcaactcctcactttttggtatgccgatgccggtggtgctgcctgctattttattaaagtccgtattgctcgccattgctgccggttgggccgcacaacgtttcggacgtatctccatcccggtattggttggcgtagtacttacctatcaagttgtagggacattgggagagtggatgtatataggaaatttctacaatgccattcaggatttccgcattggaattcccggaatgtgcctgcaagtattcggaggttatttattcattagatatttgattcgcaaataacttccttatcaataaccgcttttccctgaaaagagttataagccttgaaaaagaaagttctcctctgttatagatacccataacagaggagaacttttttaaatacaacgtatctattcgctttttatttatcaatcttcttcgtcatcttccagttcagcagagggattgcctccttctttagcatacctgctcggactcatcttatagtattttttgaatacttcccgaaaatatttagtttcagagaatccaaccatgtctgaaatctcattaatagcatattcaccctctttcaataactcggtagcacgtttcaaacgcatcccccgaataaactctgtcggagactgtcccgtcaatgctttcaatttacaatagaaactggtacggctcatgccacttgattcacagagcacattaacggaaaattcagggttgtttatattctcatccacgattttctttacatttgatataaacttccaatcgaggctgttagtaccgtttgcagatggaaccattgatttcgcttctatatccagattggcatatctcatgcgcaacagttcccggtttgccaacagattagcgatattcgcccgtaatattttcacgctgaaaggtttgatgagatattcgtccgcaccaatcgacagtccatccagaatattattttcttctcccaaagcagtgagcaacaacacaggaatatgtgaaatttcaatatcacttttgatagccacacacaattcatctccccgcatctctggcatcatgatatcagaaagaaccagttccggccaatattctttgataataatcaatgcttcctttccgttagcgcaagcttgtacattatatatagaagacaatgaactgaccagataggagcgtagctcatcattgtcttctacaacaagaatccgtcgtaaatttggatcatctatcgtagcggttgtctttgccggtacattcggagcgggcagtacaggagccaacgcctcaaatttagaagatgcttcgtcactgatactttgagaagtcttattctttttcggaaaaacaattttgattgtcgtaccttgatgttcgacactatctacactaattttacctccatgaaggctcaccagttttcctaccaacattaatccgataccactacccgtcactttagagttaatagcattgctggcacggaaatgaagcttgaacaacttactttgttcactggcaggaatacctatacctgtatccttgattatcactttccatgaatcattcgtatcggacacggaaatgctgacctttccattttccggagtatattttagcgagttcgatattatattcttcaaaatagaatccatcttctccttatcaaacgatacattcatatagctgaaagtactctcgtatgtatattcaatacgcctaatggcagcataagaagagaatgaattatatatttcattcatataggtattcaactcatactcggaaacactcattttagaggaatatacatccgttcgctcaaaattaatcagattgctgaccagtcgtaaaagaacttccacattcctcaatgcaatgttcgtacgagttattccattgtcggtaagcgtctcttcttccaataattcctccaaaggtgcttttattaaagttaatggagtacgtatatcatgggccgtattgatgaagaactgcgttttttcatcagatatattcttttgttttcttagatttatcacacgtagaacaaaataaaatccccctattaccaacagaatataacacaagatagcccaccaactcgaccaaaaaggttgcgtgatgataattttcatagcacgttcctgaaaaacaatgtcatgttcttctctggatatagcacgtacatgaagaatatatctacctggaggcaaattggtaaaacgaatcaaattatttgctcccggttgagtccatttctcataaaagccttctaatttccatgaatatagtgcatttccgggagaatcataattgattgtagaaacttcaaatgaaaacgtattctcatcataagccagctctaatacatctgtctcatcgatacttttctgtaaaggagaatccttgacacccggataaacaggttgataagacagatgaaagtcgctaaataccaatctggagaacttataatccgggaatttcacattcatcggaagttcaattgctccatccgtactaccgaatacaaagtttttatttttacgcaccgttcctgccgctgcgttaaagtatgcaggcaacaagccttctcctctagtccaattacgaaatatcttttctttagtatgaaaacaggttattccgttctctgtactcatcattatacgtccatctacttccggcaatattgtaaatattctatttgaaactaaagcagaattatcagaaaaataatgttcgaaagtcttatcttgaggattatagataaatactcccataccatttgtcccgatatataacaacccattatctgcctgataaagcgtattaatataagtgattcctatctccatttcaatatactgatattcaccagtatttcgattcaataaatacaagccagcagcagttccgatccacatattatctttgtctttttcaacaattgatgttatggaattcagtcccggatatagacgtgcactgttagtctccaaatcaaaacattttagattataatagcctcccgaccagatatgtcctcttgaatctttaactatatcacgaatatatttatccggacgcatattgacgtgagaaagaaggtaaggagagaagtattcaactgatagcgtttctttatttattttataaatgccggaagtatatcctcctgcccatataatgccaggagccacttcacataaagtaataaatatatgattcttgtcctttagttgatgattaaaagagcttagaaatgaatgccactgacctgtttttgaattataaagactaataccattactagttccaaaccacagatcaccttcatgatcttcgataaccgcttgtacctgatcattgattaatgactgtgcattacccatagcatgtttcatccaatgataattttcatagcgattatcaatcactgtaattcctgttggataattagcaagccatatccgcttttcttcatctacaaaaacatcattgatattatttccattcatttcattataactctgataattagcaataatgtaatcttccagttcacaggtatttacgttaactttatacacccccattccttccgttgcaatcagtaactctgtttcattcaatgggctgatacgagctatgtttacatcactaagatcagcgtccggacgtataatttcctgtgtattcatatcgtacacaaaaactcctctttcaaatgaaccaatgaacaatctttttaattgccgatgaaaatacagttcactcacctatgcatgaaaatagtccagtgtttcaacaggcatggtctctaaaataccattctccagtttgacatatcgtacgcccgtctccgttgctataaagaaatggtgctcatctacttgttctattgccgtaatactactatgcaatacattgggaaatcgaactatatgagcatctttaatattatacagcaatacagtatctttacgacatatccagatattatcattgcgatccagataaccacaacttattgcttcagaggtatccggtaatttatataccattttgaaatcgtctctgtcggcttcgtattgaaagactcgtccttgtttgccaaccacccatataccgatatgtggttctgtatataaccatcccaaacgtatgggagcatccaaaatagtgccttctttatttaatttatagtgttttatatctttaccgttgtatcggtccatcccttcatttgtaagaaaccacatatagccctgagcatctttctgaatattgaatatccggcgattgctcaagccatcttctattcctatatatttgtatgtttgtgctgtaacccaaacaggaaaaaagagaagaatatatacaatgtatttcatataaatagttgttttttaaactacttctaacgatcatataaacataacagttaacgaaactagacaaaaacaatgacaaatgcaaagaaataggagagattctacaagaaaacatctatttagaaacatttttatttccaaagttgattatttactttgcgaagttgatttatctgaaagtgttcttttgctatatgttataattagcgcatgttttgtttttgttaatttaactaatcagatttgattccagtttcttcttatagacccatatacttattgtaaaataaataagtgcctgtatccagagagttatatattccggtctgatatcagccatactggctcccatagaattcagtttcacaaaagcgagtgtgcctggtgcagctgggaaaatgtaatggactactttccaataccagggcattagttccattggataggaaacgccggaaagaaagattaatcctacggagaagaaggcgatcatgagtaggggagcttcagaatccgtaaaatacctggatgcagccaatcccaagaaagaagttgccatcaaatatggaatcaataatagtacgatgtacaatccgtttccaatattggggatgctgaaaaagtgagggagcaagcctaatagaaaaaaggcaaagatggcataaagagtacagtacacggacgtttttcctgccactatacgaatagcaactccccagccataccccaaaggagtatatgcacggattcctttactactgtattcttctccggtcaccataccaataaccatcagcaaggtctggaaaattataatcatcatgactgccggaataagataggaaccatatccttcggtataattgtagagtgcagtgccttccacattgatcggtttcgccatagctacggcgagcaatccttgtggtggaagaaacactgcttcatctggccggtatttatcattaatagccagcatgacacgtgaagaagcaccttgcaaagcttcgaaatacaagaaggcatcagtagttgcataaagggaaaatacggcttcatctccccggaacacccgttcctcaaaatcatgaggcaggtagagtattccctgtactttgccttctttcatccattcttttgcttcgtgatagtccatagcctgactaaaaatctctgcttggggagtagcatccagccaacggataaaatcacggctcaattcactgtgcgaattgtcgactacggcaacaggtacatcggttacaatattcggtgcatacatataattgtagagcaacccgtaaacgaagattcctcccatcaacaccagtaaaaccgcataactggtactgatagctagaaattcacgacgaatgatgaatgacaactgttgtaacttacttaatgttttcatacttatgactttctatagctcgttttaaatgaggaagcagcgacagggccagcaacgggaagatacagagtatcacagccgacggccaaagatggataaacccaccgcctccatagagcatggtttgcatcatttccgtaaaatgacggacagggaacaaattggaagcatccctcaccaacggatacatattgggaaccggaaaggttactccggacaaagtagcccccagagaacctaccatagaaactacacttataaccaacgatattgccggaaacagcgagaataaaaacagccctaaagcctgtgttgcaatgatgaaaagcacagtcatgatattcattaaccaccaactcccctgaaaaggaatatgcaaaataccaaacatgacgtaattagccaaccatcctatcagtatatatataatggtataaggtaataatttacctaaaacagctgtcactatattgccttttgcagtcgccagccaatcatctgctgtgcggaacttgatttcaatgccaaccgcatacacggtaatcaacagaatcaaaacctgaaacagcacaaagaaaaagggctgacttaaatataccgaataatccagactagggttatatatcggatggttattagcttgtacgggtaataaaaaggtggtaatctgatcctgttctactccgagtgccatcgcttgcatcaccacaggagaaagagccaccggagctaaggaagtttcgaatgccgccatcaactcaccacctaccgacattaatgcataatgataatagtaggagagtgttgcattctttccggtaatcgcattctgttcaaattggggaggtatggaaagatatccataaatctctttcttttgcacagattcacgggcagctgcttcatttacaaaatgctttgtcactttaaaagttggtacggcagaaatattcctgactatcgtccgggaagtagcagtattatcctgatcgacaataccaataggaatgttttccatctgtccgttaccaaagatcgtagccataaagaaaagggtgaacaatggcaagacaatgcagacaccaaaataaaggcgccgtgaagtcattcgccgccactctctgagcagtacggaacgaaaaggggaatatgtttgtgattcatccattctctggtttatttgatgtcgattaatctaaagtcaataacacggacatgccgggacgcaagtcatccaccttttgggttggacgggcatgaatctcaaaggtacgtaagtcataacttccggtttgcttggttgatttccaggtagcaaaactgcctagcggactaatataatagattttgaattcaatattttttttaccgatagcgggcacatccgcaacaaatgtttcgtccattttaaattgcggcatcagatcttcacgcacgttaagaacaacatgtatatcatccatcaccaccaaattcataatgggagttcccggtgcaaccaactctccacgtttagggaagattgttgctatctgaccgttttccggagcggtcaaccgagcatcgaccagcaaagccgagacttcatccactgtgcttcgagcagcatccaccatgctggcagcagacgctttatcttctttttgtgcaccatctacagccatctgatactgttcataggcagcacgttcggctgctacagccgctttatacatagcttctacttcatcctttctttgagaagtaatgacactgtccttatataaagtaagaatacggttgtaagttgtctgggcgagagtaaggtcgctcttcgttttattccataattgcagtgcagtagccacgatctgacgacgggttccggcatctattttcttgttctgttgcaccgccacctgttccaaggcattcacttgttgatacttggcatgtacttcagggctattaatgacgacaagagtatctccctggtgtacccagtctccctcctgaacgaagaaagtgtcgatacggccgggaagtttcccactgatacggatttctgttgcttcagcttgtccctgcaagaccagcggctgtttatgcattaatataactcccaggccggtgaaaataccgacagccagaagaatgatgacaaaagcccatgatagggttttactagttggtttcattgtttgttacggtttaggttgatagtttgcaaattgttccggtgtgccacaaagcgagagtagattcattagtgccacatcatattcataatatgctgccaggcgagccacttttacactggcaagcatggtttcagcatcaataacttcggtagaagttgccatcccttctgtaaatgatttctttcggatgcgtaccaattcttcacttaaggcaatcgttgcatttaaagcttttacattatcctgtgccttttccagctgcgtgtaaagcttatctaccccaacagccagatcatcacgggctttcatctgccctaaagccagagtttgttccgttaatttcgattgccgcactcttttttcacgatccagtccgtcaaagaggttccatgtaaaaccaatgcctaccatggtacgcggtaataaattactctgaatgccatgcgaatacaaggtctgttttccgaaaagggctatattcggcaaataaccgctttgggcaatccgcacttcttgtttggcaatatgctgctgcagctgtaattggttgagtgtatagttcccactgtttactgaaagatcaaatagcattttaggtggcaatgaatcattcataaaaaggggagaggtaggaatgatattggcatctgcatcctttttattcagcaaaacctttaaggcactttgcactactgtttcttcttttcgcgcagcttccaatgcacgtttggcttcatccatatttacctgggcaaaaagccttcctgctttgtcaatcattcctgctgcctctaacttcaaggcattttcataatgtttcttcaatccgttgtaggtttcttcacgaaccgtcacaatttgttgtgccagtcgaagcccgtaatagctttcaaccaataaactttgctgattggccgatacctgtgcccgactttcccgtgccagatcaaccatcgttcttccgatgttggtggcatgaaaacgcttaccaccggaaaagagtacccactcggctgataaatcaacagttgtcaaatttcttggagtcaaaggaaatataagggtatttgccccaatttgatccagtatagacgaaatgatctggtcatccggaataatggaatgtacaaagtctttagccggatcggtaaactgcgataaaggctgtttaacttcgatcttctccgacatgtgtacaaacgcacctgtagactgaagactgggataccaaaaagcattcaacttatcacgttcagccttcgcaatctcaatactcttatccgctattttcagactctgatttccttgattcaacagatgcagtgattcttcgaaacttaatggtgtctgtgcatctatctgaccgatggaaaaatacaaagtcaatagtatacaaagtcgcttattttttttcatactggttaggttatatctgaatttgagatattctaacagatgaaaagagaggtttgttcatcagaaagaatatagcaatacaacaaaagaaggtttcaacgcttttttataagatgttctatttttcatcttctctttgaatcacgtttgtatcatttctatcagatagaaaaaatgatgcataaaataatgcaagtatatgcaataagcgtgttattaatggatataaactacttgattatacaaaatataaatgcatattggagttgtttctttaaaggaaaagctctgttcctttaaatggaaccaaccgttggtcggtgagaagcgtgttctccctttaaaaggaagctaccaaatagcccataaagtacctgtttgtttctaaatcttatttattttgctagaaactaaatctgtcaatttgaaataatataagcaactttattctcacatattcaatattcattctctatttagaacctagtgatagattattcactaaaatagtttatatctgaatcttattaaccggaaatcctggagttttttctatagcgactatcgtcaatctgtatatttttaattatacgggctactaatatgcgtttttttatatccggttgtttttcatcaaaacaaaagaattgaagatgctttgatttctcttttttcttgcattaaaatttctgcgattttatttgagatataaaaattatgtttacctttgcatcaccatttcataaggcttttgagtcgagaaatgcagtaaatatgcggtaatagctcagttggtagagcggcggcttcccaagccgcaggtcgcgagttcgagcctcgtttaccgctcttttgaaaatcaggtggttatcttaaataaactgcctgattttttatttttcaagcccccttttctatggttttatctattatcggaggaaacctaaactgaactattgtagaataaccctaattgaataaccaatatggctaagaaaatagagaaatatctccccgtagattacagtgacagtttttccatagaagttacagaaaatcgtttgtctcctaaagatattattttaaaagtctttgctcataaccccgcttggctccgaatgttgtatgcaataagggcctgtttagtcaaacctttcggtatagaaactaaagctattgaaagtgaagaacttattatagaggaagacaagcaagaagcaattatgagaaaagacgataaacatttattgttttatgtcgatattttcattacaccattggaaacaggaaaacaaatgattgaggttaccacattagtaaaataccataattgggtaggaaaggcttatttcttttgtataaaaccttttcatcgggtcatagtgcctttagttctcaaaaaggcgctatgctgaacaagcatagtcgcggatgcaacgatataacgaatatgaaaaatgagatatgtaatatagaagcaaatgactttagaaaattaatgcatgaagaatagggcagttcatgcatttttcgtatttttgcaccctgttttaacactcaagaaaactttaaatagaaaaatataatggcaaaagaactgaaagaccttaccaaacgtagtgaaaactactcacagtggtataacgatttggtggtaaaagctgatttggcagaacaatctgccgtgcgcggatgtatggtgattaagccttacggatacgctatctgggagaaaatgcaacgtcaattggacgacatgttcaaggaaacaggacacgtaaatgcatatttcccgctattaatcccgaaatcattcttaagccgcgaagcagaacacgtagaagggtttgcgaaagagtgtgccgtagtaacacattatcgcttgaagaatgcagaagacggttcaggagtcgtagtagatcctgcagctaaattggaagaggaattaattatccgtccgacatcagaaacaatcatctggaatacttataagaactggattcagtcataccgtgacctgcctattctctgcaaccaatgggcgaacgttttccgttgggaaatgcgtacccgtcttttcctgcgtactgccgaattcctgtggcaagagggacataccgctcatgctacccgtgaagaagcagaggaagaagcaatcagaatgttgaatgtatatggtgaatttgcagaaaaatatatggctgttcccgttgtaaagggagtgaaatcagccaatgaacgttttgcaggtgcacttgacacttacacaatagaagccatgatgcaggacggaaaagcattgcaaagtggtacttcccacttcctgggacaaaactttgcaaaggcattcgatgttcagttcgttaacaaggaaaacaagttggagtatgtttgggctacttcatggggtgtttctactcgtttgatgggtgcattgattatgactcactcggatgacaacggattggtattacctccacatttggctccgattcaggtagtaatcgttcctatctataagaatgacgaacaactgaaacaaattgacgctaaagtagaaggcattgtagctaagttgaaagcattgggtatctctgtgaaatatgataatgcagataacaaacgcccgggcttcaaattcgctgattatgaattgaagggtgtacctgttcgtttggttatgggtggtcgcgatcttgaaaacaacactatggaagtgatgcgccgtgatacactggaaaaagaaacggttacttgtgaaggcattgaaacatacgttcagaatttgcttgaagaaatgcaagctaatatctacaagaaagcattggactaccgtaactccaagattacaacagtagacacctatgacgaatttaaagaaaaaatcgaagaaggcggatttattctggctcattgggacggaactaccgaaacagaagaaaagattaaggaagaaaccaaagcaactattcgttgtattccgttcgattcatttgttccgggcgacaaagaaccgggtaaatgtatggttacaggtaaaccatctgcttgccgtgtcatatttgcacgttcttattaaatagaaattgtatatcattataaaaaggatgaaagcgattgaatcgttttcatccttttctttttttccttccatattatattatttatggcctatcctaacagttcattagacattcaatagttatttcaagctcttttttcaatccatttcagttttatttcagaaatatcccttttctttgtagtatgtaaaaaagaaaggagacaaaattatgaagatattgattgtagaagacgaaccctctttgagagaactgattcaatgttcacttgaaaaagaacgttacgttgtagaaacagccagtgacttcaattctgctctacgcaaaattgaagattacgactatgattgtatcttattggacatcatgctaccggacggaagcggacttgatcttcttgaacgactgaaagctctccataagcgggagaacgtgattattatttccgcgaaagactctctggaagacaaagttttgggattagaactgggagcggacgattatttgccaaagccatttcatttggttgaactaaatgcacgaattaaaagcgtgattcgtcgccatcagcatgatggagagattgatatccgccaaggcaacgtacggatagaaccggataaatatcgtgtatttgtcaacgagcaggaagtggaactaaatagaaaagaatatgatatcctgttatattttatcaatcgccctgggagattaatcaataaaaacactttggccgaatcagtgtggggagaccatatcgatcaggtcgataattttgacttcatatatgcacaaatcaagaatcttcgcaaaaagctcaaagattccggtgcaactattgaaattaaagcagtctatggatttgggtataaaatgatagtagaataaaaaagaaagaaattattgtccatgaaattaatatattacatcattcttcgtattactcttgctctgacccttatactgacggtctgggctatcttcttttatgttacgatgatcgatgaagtcaacgatgaagtggatgatgctttggaagattattcggaaaccatcattatccgggcattggcaggagaggagctaccttctaaaaccaatggctccaacaatcaatattatatgatggaagtaagcaaagagtatgcggaaagccgggaggatattcagtataaagactctatggtatacattgaagaaaaaggagagaccgagccggcacgtattcttactactatctttaaagatgatgaaggacgataccacgagctgacagtatcaactcccagcattgaaaaagacgatttgagagatgccatccaggtgtggattatatttttatatgtagctttattattctgcattattatcatttccgtatgggtattttaccggaatatgcgaccgctctatgtacttctacactggctggacggttatcaaacaggaaaaagaaataaacctttgagtaacgatactcaaatcacggaattccggaaattaaatgaggctgccattcgttatgtggaacgtacggagcagatgttcgaacaacaaaaacagtttatcggaaatgcttcacacgagatacaaactccacttgctatctgccgtaatcgattggaaatgttgatggaagatgattcgctatcagaaaaacaactggaagaactgatgaaaacgcatcagactttagaatacattactaaattaaacaaatccctattattgctttccaagattgataatggtcagtttacggataccaaagaattggaactcaatgtacttctcaaacaatatctgcaagattacgaagaagtttatgattatcgcaacatagaagtcacgatagatgaacaaggcgttttcaaggtgacaatgaacgaatccctggctgttgctttgctcactaacctcctgaaaaatgcatttgtacataatattgatggaggacatatccgaatcaccgttactaagaacggtattactttccgaaattcgggagtggaacatccgctgaacaaggaacatatcttcgaacgtttctatcagggtagcaaaaaagaaggatctacagggctgggattagctatagccgattccatctgtcgtttgcaacatctgaatataaaatattacttcgagcagaatgaacattgcttcgagatttcccaatcataagattcatctgaaaaacacagaggacacggattttaagtgaacgacctgtcggttatcataaaaccaatttgtcaggtatatccatccacctgtttctccgtgtcctctgcgtcttttatagtgagcaggttatcgggatcgtatttctctcctcataaacatgatataagaaatagcgaagcaaataaccgttgccgcaatcaatccggtcaactgtggccatacaactaaaagactttgtcccaatgggagcggactagggatagctccctgtacctgttccatagtcaatggccccaaacttctgacagaaggcatcaatagtgtggtggtagcttcattaaacagttcactcggtgccaaacgcatcaaccctagaataaacttctgataactgataatctgataaggtgatgccatctgtgacggactcaacccttttgccaccaaattaacaatcatggtatagaatacactaaaaaacagccaaacagccacagatgctaaggcagaagtcgctgcctgacggaaacggagtgagaacagaatagccagattcaaccagaatgctacataaaagatactggtaatgatgaagaaaacaattctccaaaactcttctgccgtaggaggaataccaatagcaatcagcccacatcccatcaccagaaagcccaatacaaacaacatgatacctatcacaatcaaagcagccacaaacttcgcattgataatgcaatcgcgatgaataggctgggacagcatacggctcaatgttcctttattttgttcggaattgactgcatcaaatcccaaagcgattcccaataggggacctaagaagttaataaacagcacaaaagaggggagagtcccatctgaaaccgtaaacaacttcaagaaaagaaacgaaccgtccggatcattaggtttgatggcttcactaatattggtgagtgctgtatatagcgaccccatacaggtaagtgctataatacctattagtataataaaacgccaacttttgacatgatcggaaatttccttgttgacgataacccaaaaaggatgattgactttattcatgtctttctcctccttcctcaaaataatggttataaatatcagacaattcctgcttcttatctttcaattctgccatatcgatcaaagcaagtaattggccattactgaacaaacctacccggtcgcacactttctgtacctgatccagatgatgggaagagaaaagcactgtcagtccttcttctttactcaaccagcgaatcagttcgataaattcctgaacacctgcagggtcaatccctgaagtcggctcatcgagaataataatctccggatttttaataagtacatcagccaatcccaaccgctgtctcataccacgagagtatttccctgtctttttggctaactgatcttcaaggcctacccgcttcatcagttccatagccttggtttttgcctctttatcagaaataccatttaatcgcgctgtatagatcaaattctccggtcctgtcatatcatcatagaatcctacatcttctggcaaatacccaattttcctttttacttcaatggggtgtgtagtagaattgattccacaaatttcaactgttcccgaagtaggctctgtcaatcccaacatcattaagatagtagttgattttccagcaccattcggtcccagtaatccgaagatttctcctttccggatattcaggcgaatatgatctacagcagtgaaattaccgtattgtttggtcaaatcggtaagtacgatcacttgttcgcccataatttacctccttccatatttacggaacagatagtaaaccacgccgatggtggcaataatgataagaacgcctacccatccccatatcatcggagtttttactgcaactctgaactgcgcatctgcatttacttcaggagtttttgccatgatggtagtcacatagtcgcctggcaatgcttttttagaagctttcaaagtagccataaccgttgatgtctctccggcttttagtgcatcgatttttgaaggttcgaaagttacttcccagtcagcaggtttattagcagacagctgaatatctttcagtaatgaagaacctgtatttctgacttccagttctattttctttatatcacctgctgtgacatctgtactcaataacccacggggagtagtcagttccatttgataagagccagtaacaaccacttctagttccaattcggcagaagtggtacctgtagcggcgcgtaccggaattttgtaactgccggcttctacattggcaggaggagtaatatctatacttacattttgagtgctgttggcttccacttgtgcagaagtggcttgcttatagttaggtttaaaaactacattccaacctctgggtgcattagccatcaaagcatacagctgctggtcggcagtctgattttttaaagtggcgctgaaagtgaaggttgatttggaatttccctgcatgttgggttggtcggtagtaaattcagtctggtatgttcctttttgagcaaccaccacatccaacggaagtttggcgtttccggcatataccacaaagtgataattacctttattcacttttaatgggacttcgacttttaaattgaaagtctttttctctttgggaagtaccgatagttggctaaggctccagccaccggatttcatctcgtgtttccaactggaggacaatccgctgacagaaagattcgcattcgtcaactggtctgtgttgttgataagatcaatactgtagtcaattgacgctccgggagatacggagatttttgtgtaaggtgtgtacagaatcacgctcttaggtattgaatcattggcgtgcgtgtaactcatagggatcatccccaatagaatagctaataataaaaaataatttgttctcatagtcatacaaaagttcttatggttgtttaatatgaatattgtcaaatttgtgtgtgcaaaaataaacgatgtatctattagtagttttaaaagaatcctaaagaatctaatttcaagaagaaattatagtgacactatccctataggatggtgacggtatcctttatgtatagtgacgctatgttaaccggatagcgtcactatattttttcgatttttttttcggaaattctcaaaattcccaaatcttttcagattctcctctcatctttgcattatcaaattaataataatagtaaaaaccaatattaaaaaacaacgattatgaaaaagttagtattcttattagtgtgtcttttcactttgcaaacagtagctcgtgcagatgacgacaaaccaatccaggtaactcaaatgccacaaccggcacagcagtttatcaaacagcattttgccgacagcaaagtagcattagccaaaatggagagtgatttcttttataaaagttatgaagtgattttcacgaatggcgataaagtggagtttgacaacaaaggcaactgggaagaagtgaactgcaaatatagttctgtacctacagcaattattccggcagctattcagaaatacgtaacgaccaattaccctgatgctaaaattctaaaaattgagagagataagaaagattatgaagtaaaactgtccaaccgtacggaactgaagtttgacctgaaatttaatttgattgatattgatttctaaacctatttaaattgaacaaagatgaaactaaagatttatacacttttactggcactaagcgtcacatggagtctgcaaagttgtgacaacgatgacgatggttcaatagctgttcctgccgaacttcaaagtgcattttcatccaaattccctaatgctgcaaatgtgaagtgggaaactaagtctggatattatgtagcagatttctatgacggatatgaagcatctgcatggttcacccaagatggtaaatggcaaatgacagaaacggacattccttacaatgcattaccacaagcagtaaaaatgtcttttgagaacagcgaatatgcctcatggaagcgggatgatatagacaaactggaacggacaggcgttgaaactgttttcgtaattgaagtcgaaaagcagaatcaggaggtcgatttgtattattctgctgatggaactctgattaaaagcattgtagacactgatgatgataacagcgaacatcttcctgtacaattgactgaagctatgaaaaacttcatcaaccttaattccgcaacactattataaattaaactttttaagtacctgagcaacaaaaagttgctcaggattttgccatgtcagaattttcacttatcttagtgttgcaaaaaaaacaagagaatccgacgatagacatggcgaagatacaaattaaatctgagagactcactccttttgggggattattttcaatcatggagcaatttgactccacattatcatctgtaatcgactcaaccctcggtctaaggtgtagatcgttcggttatcagtacagcgaaatcatccgttctctcatgagtatctacttctgtagcggttcatgtattgaggatgtcactactcatttgatgaaccacctctcgcttcatccgacacttcgcacttgtagctctgatactatcctcagggcgataaaggagttgacgcaagaaaacatttcatacacatcagatatgggcaagacctacgatttcaatacggctgacactctcaatactttattgctcaattgtatatttgcatctggccaactgaaagagggtgagatgtatgatgttgatttcgaccatcagttcatagagacagagaagtatgatgcaaagcctacatacaagaagttccttggttatcgccctggcgtggcggttattggcgatttgatagtcggtatagagaatagcgatggtaacacaaatgttcgtttccatcagaaggacacgctgaagaggttctttgcgagatttgaacagaatgggctcactatcaatcgcttcagagctgattgtggatcatgttccgaggaaatcgtggaggaaatagaaaaacactgcaagtccttctatatccgtgctaaccgctgcagttcgatctacaatgacacctttgctctcaaaggctggaaaactgaggaaatcaatggcattgagtttgaattgaactctatccttgttgagaagtggaaaggtaaggcatatcgacttgtgattcaaagacagaaacggatggatggtgtgcaggatttttgggaaggagaatacacataccgttgtatcctgactaacgactatgattcttccgtaagagaaattgtcgagttctataaccttcgtggaggaaaggaacgtatcttcgatgatatgaacaatggtttcgggtgggacagattgcccaaatccttcatggcagagaacacagtgttccttcttcttacagcacttatccgtaacttttacaaggccattattcaaagacttgacgtaaagaagttcgggctcaatgcaacaagtcgcataaaagcgtttgtcttcaggtttatctctgtaccagccaagtggatcaggacatcaaggcggtatgtgctgaacatctatacctgtaataatgcttacgcagatgttttccagactgattttggataatgcctacaacttatgggaatgatattgtgtattgcctcaagtcacattgtggggtaaggggatattgtaggcagaagtgggtgcttcaagttcaaattatctgcaaattcagtaatgagaggacgtgtaaacgcaataaggacgttcaagggcttagttgcggatttgaggatcaatgaaaagtatccgaatgcaagaatcatggaagtagacgttgaagatgatagaaatgattgggattttggatttacagaggtagatatcattcataatggaatctcaaaagatgtattgttcaaccagactggaaattggtattctacttcatgggaaatatgtcagaatgaattgcctgaagcagtaaacaatactctcaataatcaatatggagaatatcgttttgacgaagcggagtatattgaaaaagcagatggtagcatatattatcgaattgaacttgagaagggggatgtagataaagtagtaaacataggcgagaacggtactgtcctttcataggtcaaagtgcataattctgaaacataattctcacaaacaacaaacgatgacataattcctgggggatatgtcatcgtttattatttttttactgctcctgtacacgttttcttttcactgccgatttagcagttttatcagtgatgctgtccgtttgttgcggtttcaccttttcagcttcttcccgtttccgcttattgcgtaaccgccatttattccagaaatatagatcactccatttattgaaatcctttttatacatgatacctacaccttgtgtagtcaagtttgtttttgtgtaataacggtcatttgtctcattataagccttcaaacgaatatctcccgaacgggtaatcagccattctgcttcaaagtctcctacaaagttagtattagccatcggattatcccgataaccgaagtttccgtttatcaataaacggttattcaataattgtcccgacaaaataccttctacttccatgtctgtccaacccttatcacccgtactcaaattcgtaccgatattccagttattcgtttcaaagacctgtgaaagtgcattgttcaactggccggagagagtagatgagagcaccgatgacatcacattcgaattctgattattattacgggcatcttccgtatagaacttgccaatacccagcaaataaagaatctgcatattcatttgctcttccgtactgatataattacgtaccaatgtttgtatttcatctctttcattcggaagctcaatacccagtttgatagtcggtcgtaccagcataccacttagattcatgatacaatttacacgcacattgggttgttgtataatagccgaagcatccggtatcaaatcattcaaagaggcagagttcactgtatatgaagcttgtatgtccatgttagcatccaaaggtgcaccattgaacgttattgtacttccatctttgataataaagtctttacgaatcacttcctgcaaactaaatttatatactccttgattgatccggtaattaccaaacattttcacatcgcccttattataaaattccgtccggatatttcccgtaccttttccgctgatataatctccggcaatagggtccataatgattcgcatggtggcatcgggagttgcatccacgagaatattcaaacggatatctgttttctgctcttcctcctcctgacgtttttgctgtatttgttcgtaatatgagattacttgaacagaatcctggatagtacgacgaggtgttttatccacgaatttgataaactgattgctagtagccgatgctacactaccattaatataggtaaaggtagtatttcgatttgtagtcatggccacatttacatcgagcccctgtatggcgtttccagagagcaatacattcccggtaccatataccgtaccatagaaaggcatatctgtcgattcttttgtgttcatcacaagcatattatttgcctgtatctcgaaacgatagtttaggttcttaaaatgctggaaatgcaaatatccattcattctccccgaatgcccttccatatcagagatatgtatattattgaatgtcaatccggtaggagccaaatgaatagtatcttttaccgcaaaatgtgtgtttaaaatatcaaaattcatggatgcatctgtcataaccgcaccatccaggttcaatcctttaaattttccatagaaatgtacttttcctgttcctcgccctttaatatcattggcaatagacttcatataatgttcgaggaatttcagattcaattcatttgcttcaatatttaaatcaagtccgctctcgggttttaatggataaataatacccgtgacacgcgacggagaaggagatatatcctgaatggatgcatccaaccggatacctctgttttcattatcccactcaccatatatatccagttcacccaaacgaccgtgattgagtgagaaattctttataaataaacgggtattcatgataggctttttaaacactccgcttgcataagccgttcctgttgcatcgccctcaaaatttacatcgtcggatatacttgcaatatcaaatacatatcccatatttatatcctttagatcaacctttacagtatctttaggattctcggaaagccggccgttaatacgtacatacctatcctgatgactaaaatagaaattattcacatccactcgtccggaatcgaccaccacctgcgaaggatgtatcttccagagagtatcatttaaaataacatcagtaggcttcacatccaccatcgctttcaacaatgacttttctccgcttgtacgtagaaatttggcaacagctgctaatttcccgctatatgttgctgcagcattatttccccaatccaaagtcgtactgacattgtcatctttagcttgtgcatccagagatagattgactgctcctttctttttcaaattagtcagacgaacccgtgcacgaatatgatctgccggattctcgcacagaatcatacctgactcaatatagttgttcttatattgcagacggggaaaatatccctctacacgcaagcgttgtaaagcatcattaaaatatcccttcaacgtagaatgagtatataccgttaacggtatatcaaatatcgtagataaaatgtccgtattatatatatgtatatcaaacaaaaagttattatgggtttcaatcggcttcttgggaggtaatatcaaagacggcacatatttccgcataatattcagaatactggcaggcaatgtgtgatattggaattttccctctatgcttgctttcaggaattcggaagtcaatctaagctgattttctccattttgtttggttgcccggatattcatattctgcatgaaatatgctttatccggagctgtaaattccaagctatccacattgatttctccaatcatctcatccactgatccacctgtaaaattggctttcagttttaaagagaactctgcatcaggatatttggtcgtaagattcaaatcatgtgggcgtactttattgactactgcaagaaaattaaaagtaggaactttggatgcaacatttacgtctccattcagataaatagagccattaggatcatccaacgcaatctttccattaaatccgccttgtttgtattctccgtccagtgtgatattttcatatctatatctgctataatctatcgaagcaatcagtcctttcaattctacggcaggcaagtggtcagcaatatgtcggccatgtacatccagattgaaagtaatttctcccaattcctcattatccaataatttacctagttgaaaatcctctgttttgacagctccggaatacgcaaacaatccttttgtcttatcagaactcaattttaagtcggtctttacatttccaagactcgtttgtaattgtccataagtaactaagtccgtgaagtatcccgaaatttctccctggaaactcacgttgcccaaacgttcgagaagaggaggaactccattataattaggactcaaattacgcactaaaaaaccgactccgcgggtattggccgaaagttcggaaagagttccatatacatacgcatcttgtggacgcgataagtccagaagcgatacatctccacgcagacggaactgacggtcatcggctgtaatctccagatgcgaacaagtcaactgatccacagttcccttcacctccatatccaacgtcaccggttccttgaaatgcgagaggatagggacaaaaggagaaatatcttttaaagtaacttgcgatggcaaagtacggaaagagaaatgcacctgttctgtaaaacggtcaaaagctttcaaactatcatactccaaatgaatggtatcaagcttgagagaggtttcgggcaattctattgtaaaattatcaatgtttgtctgcttgttattggcaaccagtttcaaactcatttttttcaaagagaagccggatgctttttcatcaaggctcaatcgcttgatccctaaattcaaagagtccttacttaatgccttcagcgatatattagcgatgatattttgaagctgaatatgcttagcgttaaatttccccggtgtttcttcttccgacaacacatgataagacatccttccacgacgaatcaggatggaattaatacgcaaatcaagggagttttctttcttcacggtatctttggaagcaaaagcatccaaaacaaacttaaaattaggaggggaatccggagtctctttccggagattgatattaaatccgaaaagctggacactgctaatggatatctttcctttaaaaaagggcataatatcgaacttggcagacaaacgtgtgactttgagcatttcctgaccactctgatcgtcaagcaatacatcatcaataataatacggttcaatagacccatattaattctaccaatcactacctttgtatttaaaacttcagaaagttcttcagctacaaatacactcattgcttgctgaatgtttggtatattcagcaaaacaatagtcccgatatatactcccagtacaatacctactacccagcgtacagtctttttcagcgttctgatatgcgataacttttattttgcgaacaaaaatataaaatagttcgttacgaatcgtagttttatgattacttttgcaccgtttaatagtttaaatacttatgagtgcaataattttaggaattgaatcctcctgtgacgatacgtcggcagccgtaatcaaggatggttatttgctgtcaaatgtggtatcaagtcaagccgtacatgaagcatacggtggagtagtacccgagttggcttcacgggcacaccaacaaaacatcgtaccggtagtacatgaagcattaaaacgtgccggcgtcaccaaagaagagttgagcgcggtagctttcactcgcggaccgggattgatggggtctttgcttgttggagtctcctttgcaaaaggattcgctcgttctttaaacatcccaatgattgatgttaatcatttgaccggacatgttttagctcattttattaaagcggaaggagaagaagagagacaacctgtttacccatttctctgtttgctggtatctggaggaaattcacaaatcatactggtcaaagcctataatgatatggagattcttggacagactattgacgatgccgcaggtgaagctattgataaatgctctaaagtgatgggacttggttatcccggcggaccgatcattgataaactggctcgtcagggaaatccgaaagcttttacattcagcaaaccgcatattcctggtttagattacagcttcagcggattgaaaacttcctttttatattcattacgcgactggttaaaggaagatcctgatttcatagaacaccataaagtagatcttgcagcatcattggaggctactgtagtggatattctgatggataaattacgaaaagccgccaaagaatataagattaatgaaatagctgtggccggaggagtttctgcaaataatggattgcgtaatgctttccgggaacatgccgagaaatatggctggaacatttttatccctaaattcagttatacgactgataatgcagccatgatcgccattaccggatatttcaaatatctggataaggacttttgttctattgatcttccggcttattctcgtgtgacgttataattgggtattccttattatatataataggataaaaactaagaagtatgtttgccgaaataataaccattggcgacgaactgttgataggacaggttgtcgacactaattcagcctggatggggcaggaattaaataaaataggcattgaggttcttcgtattgtttcaatccgtgaccgggaaaaggaaatcttggaagcgattgataatgcgatggaaagggtgaatattgttttagtaaccggaggactcggacctaccaaagacgatatcaccaaacaaactttatgcaaatactttcatacagaactggttttcagtgaagaagtattcgaaaatgtaaaacgggtactggcagggaaaataccaatgaatgcactcaacaaaagccaggcaatggttccgaaagattgtacagtgataaataatcctgtaggaagtgcttctgtcagctggttcgaaagagatggaaaggtacttgtttccatgccgggcgttccgcaagagatgactgccgtaatgacagaaagtgtattacctaagctgcacgagaggtttcaaacggatgtaattatgcatcaaacatttcttgtacaacactatccggaatccgtattggcagaaaaactggaaccgtgggagagtgctctgccagaatgtatcaaattggcatatttgcctaagctggggattattcgtcttagactgacaggacgcggacaaaacagggaagaagtaaaagttcttcttgaacgtgaaaaggtaaaattagagaaaatacttggtgaagacattttcggtgaagaagatacgccattggaagttatagtcggtgaacttttaaaaaagaagaaattgaccgtttccaccgcagaaagttgtaccggaggcagtattgccgcacgtttgacctccattgccggtagttctgaatattttaacggaagcgtagtagcctattctaatgaagtaaaaatgggacttttacacgtttcctccgaaacattggagcaacatggggccgtcagcgaagaaactgtgattgaaatggtaaaaggtgcgatgaaagcactaaaaaccgattgcgccgttgctacttcagggatagcaggtcctggagggggtactcccgagaagccggtgggaactgtttggatagccgctggttataaaaacgaaattcgtacttacaaacaggaaacgaaccgcggaagaagcatgaatatcgaaagagcaggcaataatgcactattaatgctccgtgatttactcaaataaagaaaaataggagcctggaagtgaattattttaggaaattcttgttttatacggataaaagtgcttactttgcgtcctgtttgaaagaagtatagatataaaactataaaaataagatagaaatgtcgaagatttgtcaaattaccggaaagaaagccatgattggcaacaatgtttcacactcaaagagaagaactaaaagaacctttgatttgaacttgtttaacaaaaagttctattatgtagaacaagattgttggatcagccttagcatttgtgctaacgggttgcgtattatcaacaaaaaaggactggatgctgcgctgactgaagcagtggctaaaggttattgtgattggaaaagcattaaagtaatcggctaaacgtagaggagaaaacttacaatggcaaagaaagcaaaaggtaacagagtacaagtgattctggaatgtacagaacacaaagacagtggaatgccgggaacatctcgttatatcacaactaagaacagaaagaatactacagaaagacttgagttgaaaaaatacaacccgattctgaagagagtaacagtacacaaggaaattaaataataaagtagtataacccatggcaaagaaaacagtagcaagtttgcacgaaggttctaaagaaggtcgtgcttataccaaggttatcaaaatggtaaaatctccgaaaactggagcatacgtttttgatgaacaaatggttccgaacgaaaaagtacaagactttttcaaaaaataatcgaaatagcatatacgctataactgcaaaatcctctcattggcgaacaatgaggggattttttattgcttctttttttacttttccaatcctttgttatatctttgtagcaaatgtattatacaaacaagtgtaaatatgggattttttagttttttttcaaaggagaagaaggaaactttagataaaggattatctaaaaccaaagagagcgtattcagtaaaatagctcgtgctgtggctggcaagtcaaaagtagacgatgaagtattagataatctggaagaagtgctgattacatctgacgtaggtgtagaaacaactttaaatattatcaagcgcatcgaaaaacgtgcagctgcagataagtatgtaaatactcaggaactgaatcttatattacgtgacgaaatagcagctctgcttactgaaaataattcgggtgatgtagctgatttcgacgtacccatcgcaagaaaaccttatgtcattatggttgtgggagtaaatggggtaggtaaaactacgaccattggtaaactggcttaccaattcaagaaagcaggtaaatccgtttacctgggagccgccgacactttccgcgctgcagctgtggaacagctaatgatttggggagaacgggtaggagttcccgtagtcaaacagaaaatgggagcagatcccgcatctgtagcttatgacacccttagttcggctgttgccaataacgcagacgtggttattattgatacagccggtcgtctgcacaataaggtgggcttaatgaacgagctgaccaaaattaagaatgtgatgaaaaaggtagtgcctgatgcaccggatgaagttttattggtactggacggttccaccggacaaaatgcatttgagcaagccaaacaatttactttggcgacggaagttaccgctatggccatcactaagcttgatggaaccgctaaaggtggtgttgtgattggtatttccgatcaattcaagattcctgttaagtatatcggactaggcgaaggcatggaagacctgcaggtattccgtaaaaatgaattcgttgattccttgtttggagaaaatgcatgaaaagaaaaacaatagatattattactttaggatgttctaaaaatctggttgactccgagcagctaatgcgccaattggaggaagtcggatacagcgtaactcatgacactgaaaatccgcaaggagaaattgcggtaatcaatacatgtggtttcattggtgatgccaaagaagaatccataaatatgattctggagttcactgaaagaaaggaagaaggggatttaaagaaacttttcgtgatgggttgtctttccgaacgctatctcaaggaattagctgttgagataccacaggtagataagttttatgggaagtttaattggaaggagcttttacaggacttgggaaaggtctatcacgatgaattatatatcgaacggacattgacaactccccagcattatgcttacctgaaaatttcagaaggatgtgatcgtaaatgttcttattgtgctatccctattattacaggacaccatatttccaaaccaatggaagaaattctggacgaagtacgatacctggtatcgcaaggcgtgaaagaatttcaggtgatcgcacaggaattgacttattacggcatagaccggtataagaaacaaatgcttccggaattgattgagcgtatttctgatatacccggggtggaatggattcgcttgcattatgcctatccagcacatttcccaacagatttattccgggttatgcgcgaacgtgacaatgtatgtaaatacatggacattgcccttcagcacatcagtgacaatatgttgaagttaatgcgccgacaagtgagcaaagaggatacttaccaattgatcgaacaattccgcagagaagtgccgggcattcacctgaggacgactttaatggtaggacatcccggagaaaccgaggaagacttcgaggatctcaaagaatttgtacgtaaagtacgttttgatcgaatgggtgctttcgcatattccgaagaagaagggacttatgctgcagaaacatacgaagattctattccacaagaggttaaacaagcccgacttgatgaattgatggatatccagcaaggtatttcggcagagttaagtgcagaaaagatcggtaaacagatgaaagtgatcatcgatcgtctggaaggagattattatatcggacggacagaatttgattcaccggaagtagatccggaagtattgattgatcgttcagagagagaacttaagatcggacagttttatcaggtagaagtggtgaatgcggacgattttgatttatatgcaaagattataaatgactatgaataataaggaatttacatccgaactagcggaaagattgggatacacaatcaaggatacttccgaattgatgaattctttgttgtccagtatgacacaagaattggaagaaggtaatgtgattgcaattcaaggattcggttcttttgaagtgaaaaagaaagcggaacggatttcaatcaacccggcaagcaaacaacgcatgctggttccacctaaattggtattatcgtatagacctagcaatacattgaaagataagtttaaataaatatttcccgttatgaatgaaagactaacaattcaagaccttactgacttattggcagccaaacatagcatgaccaagaaagacgccgaagcgtttgttaaagagtttttcctcttgatagaacaagccttggagaacgaaaatactgtaaaaatcaaaggattgggaactttcaaacttattgatgtagatagccgggaaagtgtcaatgtcaacacaggcgagcgtttccagataaaaggacatacaaaagtctcattttctccggatgcaaatctaagggatacgataaataaaccttttgcacactttgagactgttgtattgaatgaaaatacaattctggaagatactccgatagaagagactgaggaagaagaaacaggagaggaagcgtcagcacaggcagtcttgaatgagatgggggatgactctgaaactactgtgatagaagaaaatgaaggtactgatgatggtctttcggaagaagagccgattcaggaagagcaaatagccagtcagccacttgtggaagagtccattgaagaacctgctattactgaggaatctgcaatagcacaggaatcgacagaacagacgtctcctaaagagcccgaagaagccattacagagactgatatcgaagaaaaggtagaacagctggaagatgaagaggttccggaagaggaagtgataatcaatgagcagcaagcagcatttatagaagaagaaaaagaagagatcactgccgaaaagattatagagcaagagcttctaaaagcaaatctgcaacctgtgactcctatagtgcctcctgctgaaaaagaaacgataaaaccggtccaaccggaacaagtatcccaaccggtttctaaaaagacagcccctgtgaaggaaaaatctcctgtaccttatttaatagctgttattgtagtcgttttgttattatgcggaggtgtcattctttttatttattatccggatttatcctcttcttcatctgacaagaatgcactggatatgccgcctgtgaccactcaacccgttcaaccggaagcgcagctttctgatacgattgcacataaggatactacaaaggtaataacgcctgatgtatccaaagtcgctaccacgacacaaccggttgccaaaaaagaagaagctattcctgtcaaagcagaacctcaaacggttacacaacaacctgctacttctgcctatctggattcagcatcttataagattacgggaaccaagacaaaatatacaatcaaagaaggagaaactttgactagggtttccttgcgtttttatggtacaaaggcaatgtggccatacattgtgaaacacaatccgaaggttattaagaaccccaacaatgtaccgtatggcacaactattgaaataccagaacttacaaaagaataagtagttataatccattcacccgaccatgcaaatcctgtattggtcgggtgaagtgttatggatgtacaaaagcgtatgaaagtaccttaatctaaagatttcgcattgttttttaataaaaattagttgcaatcgttaattatatggcgtacttttggggcaaaataaaaagccttatgacacaggcaaggcttacataaaattaatgggatttaaataataaaatattaagtatttatggctgaatcaattgatatccgcgagctaaatgagcggattgaaagacaaagtgctttcgttaccaatcttacgacaggtatggaccaaatcattgttggtcagaaacatttggttgaatcactgcttatcggattactttccgatggccacgtcctcttggaaggtgtgcctggtttggcgaaaactttggctattaagacactcgcttctctgattgatgcgaaatatagccgtatccagtttacgccggacttattgcctgcagacgttatcggtacaatggtttacagtcagaaagatgaatcttttaaagtgcagcgcggacctattttcgcaaactttgtattagctgatgaaattaaccgtgctcctgcaaaagtacaaagtgctttgctggaagcaatgcaggaacgtcaggttactattggtaaagaaacattcatgttaccggaacctttccttgtattggcaactcagaaccctatcgaacaggaaggtacttatccgcttcctgaagcacaggttgaccgtttcatgctgaaagtagtcattgattatccgaagttggaagaagaaaaattgattattcgtcagaatatcaatggtgagaagttcaatgtgaaacctattctaagagcggatgaaattattgaagcacgtaaggttgttcgtcaagtctatctggatgagaagatcgagcgttatattgtagatatcgtatttgcaactcgtttccctgaaaaatatgatctcaaggaactgaaagatatgatcggattcggaggttcacctcgtgcgtctatcaatctggctttagctgctcgtacgtatgcattcatcaaacgtcgcggctacgttattccggaagatgtacgtgctgtagcacacgatgttcttcgtcaccgtatcggattgacatacgaagctgaagctaacaacatgacttcggacgaaatcatcagtaagattctgaataaggttgaagtaccctaatttgtagttataatacagtcaataagtagtcataaatatctatgcatgactacttaactacctactaattaactactgtataaatggaaacaagtgaaatactaaaaaaagttcgccaaattgaaataaagacacgaggattgtctaacaatatctttgcaggccagtatcattcggctttcaaaggtaggggtatgtcattttcggaagtccgtgaatatcaattcggtgatgatatacgtgacatagactggaatgtgactgcgcgcttcaataaaccttatgtgaaagtgtttgaagaagaacgtgaactgacagttatgttaatggttgatgtttccggaagtttggaatttggtacgatcaagcagttaaagaaagatatggtgacggaaatcgctgctactcttgctttctctgccatccagaataatgataaaataggtgtgattttcttttcagaccggatagagaagtttattcctcccaagaaaggacgtaaacatatcttgtatattatccgtgaattaattgatttccaaccggaaagccgtcgcacaaatattcgtcttgccttggaatatttgacaaacgtaatgaaaaggcgttgcactgcatttatcttatcagattttattgaccaggaaagctttaagaatgcgctgaccattgctaacaggaaacatgatgtagtagcattgcaagtatacgacaggagagtcagtgatcttcctccagtaggactgatgcgaatcaaagatgcagaaactgggcatgaacaatggattgacacctcttccaaagctgtacgccgggcacatcgcgactggtggatacaaaagcagactgaactgaacgatacttttaccaaaagtaacgtagatgctgtatccgtcagaaccgatcaggattacgtaaaggcattgttgaatttatttgccaaacgaaattaatggaatcaaagatgaatagaaatattattctgatagcattattaggtctattgtttgtcagtaaagcagtagcacagtctgttacagtagaagcaaaaattgattcactgcagatactaatcggcgaacaggcgaaagtgcaattgcaagtagccatggatgccaaacagcgtgctatttttcctgcttacactgatacactggtaagaggtgtggaaattatagaaacagtcaaaccagatacccaattcctgaatgatcgtcagaggatggtgattacgcaggagtacattatcacttcttttgactctgctctatattatctgccgccaatgccggttaccgtagatgggaaagtgtacaactccaaagctctcgcattaaaagtatattcaatgccggttgacaccttacatccggaccagttcttcggacaaaaatctgtgatgaaagctccttttgcatgggaagactggtatggattgatcgcttgttcattcttggctttacctttgcttggtttgctgatctatctgattgttcgcatacgtgataataaaccgattatccgtaaaattaaagttgaacctaaattgccgccacatcaggctgcaatgaaagagatagaacgtatcaagacagagaaggtgtggcagaaagggcaatcgaaggagtactataccgaacttaccgatgctattcgtacatatattaaggatcgtttcggatttaatgcattggaaatgacttcttctgaaataattgatcagttactggaaatgaatgataaagaggccatatcagacctaaaactattgttccagactgctgatttagtgaagttcgccaagcataatcctcagatgaatgaaaacgatgccaatttgattaacgccattgattttatcaatgagaccaaacaactggaagaggaaaatcagaaaccgcaaccaacggaaatcactattattgagaaacgttctttacgtgttaaagctatgctgatttgtggaattgcattgttatcagcagcattgatcggtacctttatatatataggtctacagttatacaatctttttgtataaaggatgtatagcttaatactaaatagtaaactgttaaatcataaataaaatggtttttgccaatattgaatatctgtttttgctattattgcttataccgtatattgtatggtatatcctgaagcaaaagaaaagtgaagcaactcttcaaatttcagatgcccgggtatatgcgcatacacctaaaagttataagaattatttgttgcatgttccatttctattacgctgccttgctttagtactggttattttggttcttgcacgcccgcaaactactaataagtggcagaacagtgagatagaaggaattgatattatgctggctatcgacgtttctaccagtatgctggctgaagacttgaagccgaacagactggaagctgctaaagacgtagctgcagagtttatcaatggacgtcccaatgataatatcggtattacattatttgcaggagaaactttcacccaatgtccgttgactgtagaccatgctgtattattggatatgatacataatatcaaatgtggtcttatcactgacggtactgctgtcggtatgggtattgcaaatgctgtaacccgcttaaaagatagcaaagcgaaatccaaagttattatcctattgacggatggtacaaataacaagggagatatttcgcctatgacagcggcagaaatagcaaaaagctttggtattcgtgtatataccatcggagtaggtaccaatggaatggctccttatccttatccagtcggaaatacggtgcaatatgtaagtatgccggtagaaattgatgaaaagacattgacagagattgccggaacgacagatggtaactatttccgggctacgagcaactcgaagcttaaagaagtatatgaagaaattgataaactggaaaagacgaaactgaatgtaaaagagtatagtaagcgggacgaagaatatcattggtttgctttagcagctttcctctgtgtcttgttggaagtactattacgtaattcggtactcaagaaaattccataaggatgtttgtcaatcgttatttgccaatcataaaatagtaagaagatgtttcgatttggagaacctacatatttatatttattgttgctattaccttttttagcagctttctacttgtattccaattacaagaggagaaagaatatccgacgtttcggagatccgactttgttggctcagttaatgcctgacgtatccaaatatcgtccggatgtaaaattctggattatttttgttgctattggtttgttctccgtattactggcacgccctcaattcggttcaaaactggaaacggttaaacgcaagggagtagaggtaattattgctttggacatttcaaactctatgttagcgcaggatgtacagcctagccgtttagaaaaagcaaaaagattaatatccagattagtagatgagcttgataatgataaggtaggtatgattgtatttgccggtgacgcttttacacagctgccaattacaagtgactatatttccgctaagatgttcttagaatccattagtccttcgttgatttctaaacagggtacagctattggggaagcaatcaatctggcagcccgtagtttcactccgcaagaaggggtaggacgggctattattgttattactgatggtgaaaatcatgaaggtggtgcagtggaagctgccaaagctgcggcagaaaagggtattcaagtaagtgtattgggagtaggtatgcctgatggcgctccaataccggtggaaggaacgaatgattaccgccgcgaccgggaaggtaatgtgattgttacccgtttgaatgaagctatgtgtcaggaaattgcaaaagaaggaaaaggtatatatgtacgagtagataattctaattcagcccaaaaggccatcaatcaagaagtgaataaaatggcgaaatctgatgtagagtcgaaagtatatacggagtttaacgaacaattccaggctattgcatgggttattctactattgttattggcagaaatcttaattctggatcgcaaaaatcctttatttaagaacattcacctgttttctaataagaaatagttatacgtatgttaaaaagtaaatatattctattcgctgtatttctgttagcggcagctggtgtatcggctcagaaagcagaacgcgactatatccgtaagggaaaccgtctgtttaatgatagcgtatttgttgatgcagaggtgaactatcggaaggccttggaagctaatcccaagtctacggtatccatgtataatctgggaaataccctttcgcaacagcaaaagtttcaggatgccatggaacaatatgtatcggccagcaaaatagaaaaagataaaatgaaactcgcccatatttatcacaatatgggagtaattttccaggctggtaaagactatgccaaagctgtagatgcatataaaatgtcactgcgtaataatcctaccgatcatgaaacccggtacaatttggctctcgcacagaaaatgctgaaagaccaacaaaatcagcagaatcaagatcaaaatcaggaccaaaacaaagatcagcaaaagcaagatcagaaacaggaccagaataaagacaaacagaaggatcagaaacaagatgaaaagaaagatcagcagcaaccaccgaaatctgaaaagaaacaagacaatcagatgtcaaaggagaatgctgaacaattactgaactctgtcatgcaggacgaaaaagatgtgcaggataaagtgaagaagcaacaaaaagttatgcaaggcggtcgcttggaaaaagattggtaatataaagttgatgatataaatttcataagcaatgaaaaaactgattattatattgatggcattgatagcatatagcactcatgtgtttgctgataaggtgtcttttactgcttctgctcctgatgcagtggtagtaggcgaacaattcaggctgtcgtatattgtaactacacaaaaagtgaaagattttcgggcaccatcaatcaaaggttttgatgtattgatgggtccaagccgttcacaacaaagtagtactcaaatagtgaatggtaatgttacatctactagtagtattacatttacatacatattaatggctaataatgccggagaatacacaatacccggtgcctccattgttgccgatggtgaccaaatggtgtcaaactcagtaaagattaaagtattgccacaagatcaaggtggcaatagcggacaaaataatagtagtagtggttctatacattcctcatctggtacaagtgtctctaatcaggacctttttattatggcaagtgccagtaaaacaaatgtgtatgaacaggaggcttttgtcctgacctataaaatatacaccagagaatccaacttacaacttaataatgcgaaattgcccgactttaaaggtttccattctcaagaaatagaaatgacaaccaatgcaagatggactccggagcattatcagggacgtaattactatacaacggtttatcgccagtttgttctcttcccgcaacaatcaggaaagctatatattgatccggcacagttccagatgactatcggaaaacctgtgcaatcagatgatccttttgatgccttcttcaatggaggaagtaatgtcattgaaattaaaaaaaatatttccactcctaagatagcaataaatgtcaatccgcttcctacgggtaaacctgcagatttttcaggtggagtgggagagttcaatatatcttcttctatcaacagtaaggaactgaaaaccaatgatgctattactattaaactggtaatatccggtacaggtaacctgaagttgatttctaatccggaaattaaattcccggatgattttgaagtatatgatcccaaagtagacaatcaagtcagattaacccgggaaggactcacaggcaataaagttattgaatatttagcaattccgagacatgccggaacatataagattccgggagtatctttcagctattttgatattcgctccaagtcttacaaaacactgaaaacagaagattatgtagtaaatgttgagaaaggtgcaggtaatgcggatcaagtaattgctaacttcacgaataaagaggacttgaaagtattaggtgaagacatccgttatatcaaacagaatgaagttactctccaacctaaaggaagtttcttctatggttcaatgacatattggttattctatatcattccggctcttgcctttattattttctttattatttatcgtaagcaagctgctgaaaatgcaaatgttgctaaaatgcgtacgaagaaagcaaataaagtggcaacgaagcgtatgaagcttgcaggaaaattactctccgaaaataaaaaagatgctttctacgatgaggtattaaaggcattgtggggatatataagtgacaaactgaatattccggtatctcgtttatctaaagataatattgaagagaaactaagaaatcacggagtaaatgaggaactaatcaaagaattcctgaatgcattgaatgattgtgaatttgcacggtttgctccaggtgatgagaatcaagctatggataaagtttattcttcttcaatagaagtaataagcaaaatggagaattcaataaaacattaacccagaagagattatgtcatgaaaaagatattattttttatattattatcaatgtcgcttacttgtttcggacaagattcgttaagcattgatactagacaaacgaatggagttgattctatccacgcttcgcataccacattttccagtaatacactggaagatgcaacaaaagctgaaggagattccgcatatataaaagaagattatgcagcagctattcagatatatgaagcattactgaaaaatggagaagctgccgacgtctattacaatctgggaaatagttattataaaataggggagatagcgaaagctgttttaaattatgagcgtgctctgctattacaaccaggaaatggtgacatccgtgctaatcttgaagtggcacgtgcaaaaacaatagacaaggttgaacctgttcctgaagtattctttgtttcatggatcaaatctctgacaaatagtatgagtgtagatgcatgggccacatggggtattgtctcctttattctattgattatcgctttctatttctttatattctccaaacagattatgttaaagaaaataggattcatatcaggaatcattttgctgattgtcactgtttgctctaatctttttgcttcgcaacaaaaagagcatttggttaatcgaagtgaggcgatagtaatgaatccgagtgtaacagtacgaagtactccaagtgagagtgggactagcttgtttattctccatgaagggagaaaggtaagtgtcaaagacaactctatgaaagaatggaaagaaattcgactggaagatggaaaagtcgggtgggtacctgcttctgctatcgaggtgatataaaggtcattaatagattttatatattcaagaaaaaaagataagcaaataatttgttttatctttttttttgcttaagtttatagcgtgataaaaaaatcacatagtattaaccattaaatttatgagacatgagaacaataacgtttaatgaacttcgtaaaattaaagattcattgcctagcggtagcatgcatagaatagcagacgaacttggtttgcacgtagatacagtgcgaaacttcttcggaggacacaatttcaaggagggaaaaagcgtcggaatacatctcgagcccggtccagatggtgggcttgtaatgttggatgacacgaccgttcttgatcgggctttaaaaatcctagatgaattgaatatgagtatgcaaaaagaacaggctaccgaatctgtgcaagtttaaaatataacaaactgaatcccaattgaatcaaacaattgggatttcttatttgttttcaccttataaaatgtacatttatggaagacaaattagtaaccctggccattctgacatacaccaaagcgcagatcttaaagaatgtcttggaaaatgaaggtatagaaacctacattcataacgttaatcaaatacaaccggttgtttcatcgggagtgcgtttacgaattaaagaaagcgatctgccacgtgctttgaaaataacagaaagttctacatggctgtctgaaagtatagtgggagagaaggagcccaaagtaaaagataaatcaaataagattttaattcccgtcgacttctctaattattcgatgaaagcatgtgaatttgcattcaacctggcaaaaacagaaaatgcagaagtcatcctgttgcatgtctatttcacgcctatttatgcatcgtcgttgccttatggggatgttttcaattaccagattggagatgaagaatctgtaaaaacgattatccaaaaagtccattctgatctcaatgctttatcagagaagataaaagaaaaagttacatcaggcgaatttcccaacgttaaatatagctgcatcttacgtgaaggtattccagaggaggaaatcttaagatatgctaaagaacagcgtcctatggtcatcattatgggtacccgaggcaaaaatcagaaagacattgatttaattggcagtgtaaccgctgaagttattgacaggagtcgcacggctgtattggctattccggaaaatacaccatttaaacagtttagtgaagcaaaacggattgcctttattaccaattttgatcaaagagatctaattgctttcgaggcattctttaatacttggaaatcattccatttttctgtatctttgatacaccttacagattctaaagatacctggaatgaaataaaactagcaggtataaaagaatattttcacaagcaatatccggggcttgaaattcattatgacgtagtgatgaatgataatttattaaaaggacttgatcagtatatcaaagataatcatatagatataatcactttgacttcttacaaaaggaatatatttgctcgattatttaatccaagtattgccagaaaaatgattttccattcagatacaccattgcttgttattaacagctgatcaaatcaggcaaaaaatgagcatccaagattagggaataattaatattatgtttaatagaaaaaggagtaatataatgaccttactcctttttctatttttatttaaatgaagaaatttacctgttccactcaagtccatatcaaatataagatttttcaattactactttaaactattgaataaaaaaaagaagactactatttctaatagccttcttatattttttcagaaaacgatcttacttcatcatcttatcgatttcttcgaattcaggtcccatattcaagttatagtaaactctgtaaagaccttgcaaccataaatcttgttgatcgggttttaaagctctggctttttcatagaatggtttagcttcttcgtagaatttcttaaccacagcttgtgcttcagcgtacttaggatcattgatatctgttgttgctttatcagcataatcctgtgctttcatcaaatataccaaacctacattagagtatgcttctgcatattccggatcagcagcaatagcttttttgtagtattcgattgcattatcatattctttcatattatgataaagatatgcttttacatacaaatacaacttgttattcggatcattagctaacattctatcagcaaactccatagctttagaagcttgattagagctattataataatcaaccaaattagcgaagaaataatcatttccagggaacttaaggataccctcttccaaagacttaatccatgcagcagtatcacctttagctttataagcatcagccatcaattgcattgcaaatttacctccatctttatcggataaagccataggagcatatttaatgatcgcatctttatcgcctactctatcagcagctaatgttgcataataagcaatttgcggaagaagagtatcgtttttagccaattctttatcagctaacatcggataagaagctgactctacataggttgcaaagaacttcaaagcctctttattcttgtccaggttgaaatactgaataccaccattaatcaaattaggacgttcagccaacatactggaagcattagccttccgatatttgtttttaacttttcccttttcattaggtatttccgctaattcatcacacttattatagtactcatacattttcagaatactattgtatactttcaatgtatcatacggtttcttcaaaaaagcatttttcatttgctcctcgttgatacgtctctgaataaatccagcaacgtcccatgtgtcagcaagatccttcgtttcaggattcttcatagcctccttaataagctgttcagcctgcttaaaattaggttttacgtcattagccatactctttgcttctttcacattcttcatctgagcgaatgagaagctaacagccatcaataaaaccatagaaaataatactcttttcatgattgttgtttgattaattattaatattatgtctattcctcaatttcgttattgctttcgttttcatttacgtccgctgcatcatcaatatcaggaacatcagcattcggatcactcacgattgtaccctctgcctcttctgccggaatttcatcttcaagactttctgtcataaccttacataccgaaccaatctggtcgttacgtttttcaagatttatcagacgaacgccttgagtagcacggcccattatacgaacatccgctaccttcaaacgaatagtgataccagacttattgataatcatcaagtcattttcatcggttaccgacttgattgttaccaacttacctgtcttttcggtaatattcatggtcttcacacccttacctccacggttcgttttacgatagtcttcaatttcagaacgtttaccatatccttgttcggaaactaccattacagattctgtctccaaatctttgatacaaatcattcctactacttcatcctgaccatcattatccaacgtaataccacgtacacctgttgctgtacgtcccattacacgaactgctgcctcatggaaacgaattgcacgaccattgcggtttgcaatgatgatttcattatttccattcgtcatacgaacttcaattacgctatcatcttcgcggatagttatagcatttacaccattctgacgaggacgagaatactgttcaagcaatgtcttctttattacacctttcttagtacagaataatacatagtggctattgataaactcggaatcctctaaactcttcacacgcaagtatgcagttacattatcatccgaatcaatattcaacaagttctgaatagcacggcccttagaattcttcgttccttcaggtatttcatatactttcagccaataacacttacccttttgtgtaaagaacatcatggtattgtgcatggtagcaggataaatatgctctacaaagtcttcatcacgggtttccgtacctttcgaacctactccaccacgattttgggcacggaattcggtcaacggtgtacgtttaatataacccatatgagaaattgtaataatcatctgatcatctgcatagaagtcttccggattaaattcttctgaagaataaacaatttcagagcgacgtacatctccatatttcgctttgacttctaacaattcctctttcattacccgacgacatacttcatcatcagccagaatactttccaaataagctatctgcttcattatttcttcgtattccgcatgaagctgatcctgcatcagaccagttaactgacgcaaacgcatttctacaattgcacgagcctgaatttctgtcaggttaaatcgctcaatcaagcctgttattgcgtcattcggagtttttgcagcacgaatgatacgaattacttcatcaatattatctgaagcaataatcaaaccttcaagaatgtgcgcacgctctttcgccttacgaagatcgaactgagtacgacgaataacaacttcgtgtctatgctctatgaaatatttaattaaatctcttagattcaacgtttttggacgtccatgaaccaaagccacattgttaacaccaaaagaggtctgcaaagctgtcattttatagagtttattcaacactacacttgcatttgcatcacgttttatgtcaataacaatacgcataccatcacggtcagactcatcgttggcatttgagataccttctatcttcttatcatttacaagatcagcaatatatttaatcagttcggccttatttacattataaggaatctctgttattacgatcttgtcatgtgtttgtccgctttcaatttcagctttcgcacgcataattacacgtccgcgacctgtcaaatatgcttcgcgtacaccactcacaccatatatatatccgccagtagggaaatccggtgctttaacaaattccatcagttcctctaccgtaatttccggattatcaatatatgcatcacatgcttcaatcacttccgaaagattatgaggaggcatattggtagccataccaacagcaataccggatgctccgttcaccagaaggttcgggatacgcgtcggcatcaccttaggttccaccagcgtattatcaaagtttggctcaaaatcaacggtttccttatacaggtcatccatcattgcttcacccaacttattgagacgagcttctgtataacgcatagcagcagggctatcaccatccacagaaccaaagtttccctgtccatctaccaaaggataacgcattgcccattcctgcgccatacgtaccattgcaaaataaacagaagaatccccatgaggatgatacttaccaagtacctcacccacgattctcgctgactttttataaggtttgtctgaagtattgcctaattccatcattccgtataaaattctacggtgaacaggcttaaatccatctctaacatccggaagggcacgcgaaacgatgaccgacatggagtagtcaatgtacgatgacttcatttcctcctcgatgttaatctttataattctgtcttgttcaagcatttaaaatgattattaattatacattctacggtttgtgaaaaaccacgctaaagtactacttttccccgatatacgaaagtttttagaaagaaagttttatcatgaccgggacgataacccgccaaactttaaaatacaaaaataaaaagataaaaacgataaatataatatggaaagataaataacatcggtaaaaaagagcctattatttgttataccttatatatataatacaaatacactgtttttatggcacgccatttgtagatataagaaataaagcaaatattgcaatacaaacttgattaaatgcgtatatttgccagtgaataacccttagaagaaaaggaaaaaagtatgaataatcaattctcacaaagagtttccgacattatcgtctatagtaaggaagaagcgaatcggttgagaagtaggtatataggtcccgaacacctgcttctgggaatactccgtgacggtgaaggaaaagctatcgagatattgtctaaactcaacaccaatctggctgctataaagcaacagattgaagctcagctgaaggcagaagctgatgaaatgttattgcctgatgcagaggtgccgttatctaatgatgcggcaaagatattaaaaatgtgtattttagaagctcgtggaatgaaaagtaacatcgctgatacagaacatgtattattggctattttaagagaaaaaaacaatatggcggcttccgtacttgaagcaaacgatataaactacgtgaaagtactggagcaagctacattgcagccggatatcaattccggcatgggcttttcggaagacgatgaggatgacgaagaaatgtcttctcctcgttccggcagaggtggctcggatgaacgccaacaggcacaaaccgcttccaagaagccgtctaatgatacgccagtacttgacaatttcggtactgacatgacaaaagcggcagaagaaggacggttggatcctgttgtgggcagagaaagagaaatcgaacgtttagcgcagatattaagtcgacgcaaaaagaataacccaattctgattggtgaacccggtgtaggaaaatcagcgattgttgaaggtcttgcattgagaatcattcagaaaaaggtttcgcgtatcctgtttgataaacgagtcgttgctcttgacatgactgctgttgtggcaggaacaaagtatcgtggacaattcgaagaacgtatccgttccattctcaatgaattgcaaaagaatccgaatgttatattattcattgatgaaattcatacgattgtaggtgcaggctctgcagcaggctctatggatgccgccaatatgctaaagccagcattggcaagaggagaaatacaatgtatcggtgccaccactcttgatgaatatcgtaagaatattgagaaagatggcgcattggaacgtcgtttccaaaaagtaatcgtagaaccgactactgctgccgaaactctgcagattttgcgtaatatcaaggataagtatgaagatcatcacaatgtgtattatacagatgaagcattggaagcatgtgtcaagctgacagaccgctatatcacagatcgtaatttccctgataaagccattgatgctttagatgaagccggctcacgtgtacatcttactaatgtcaatgtacccaaagagatagaagaacaggaaaagctgatcgaagaagctaaaaacaagaaaaatgaagccgtaaaatcgcagaattttgaacttgcagccagcttccgtgataaggagaaagaactttctatccaattggatgagatgaaaaaagaatgggaagccaatctaaaagaaaacaggcaaactgttgatgcagaagaaattgccaatgttatctcaatgatgtcaggcattccagtacaacgaatggcacaggccgaaggcatcaagctagcaggtatgaaagaagatttgcaagctaaagtcatcgcacaagacacagcgatagaaaagctggtcaaagccattttgcgaagccgtgtaggactcaaagatcctaataagcccattggcacgtttatgttcttaggtccgacaggagttggtaaaactcacctagcaaaagagttggccaagtatatgttcggttctgccgatgcactgattcgtatcgatatgagtgaatatatggaaaagttcactgtttcacgcttggttggggcacctccgggatacgtaggatatgaagaaggtggccagctgacagaaaaagtgcgccgtaaaccatactctattgtattgcttgatgaaatagaaaaagcacatccggatgtattcaatatcctgcttcaggtaatggatgagggtcgtctgactgacagttatggcagaatggtagatttcaaaaataccgttattatcatgacttccaatatcggaacccgccagctgaaagaatttggacgtggtgttggttttgcgacacaaagccgcctggatgataaagaattctcgcgaagtgttatacaaaaagctctaaataaatcattcgcgcctgaattcatcaatcgtgtagatgagattatcacgtttgatcaactttctctggaagcgataacaaagattatagacatagagctaaaaggattgtacgatagaatagaatctattggttacaagcttgttattgaagataaggcgaaagaattcatcgctagcaagggatatgacgtacaatatggcgcccgtcctttgaagcgcgcaattcaaacctatctggaggatggtttatccgagctcatcatttcctcgtctttaaaagagggagatactattcaagtaacccttaatgaagaaaaaggcaaattggagatgaaagttgtttctctggaatagagttatttcctgaataagaaaataatttaatatgccataatgtcagaccttcgggtctggcattttttttgtctctgtatggacaaatatcaattaaaattaatcaatagataaactaaaaaaatatacgtattatgcaaaaaggtaatattggggttacaacagaaaacattttccctatcattaaaaagtttttgtacagtgaccatgagatttttctgcgcgagttagtatccaatgcggtagatgccactcagaagctgaatacgcttgcttctattggcgaattcaaaggtgaactgggtgacttaactgttcacgttgaattaggcaaagatactattgccatttctgaccgtggtatcggtttgactgcagaagaaatagagaagtacatcaatcaaatagctttctctggagctaatgacttcctggagaagtataagaacgatgcaaatgccattatcggacatttcggacttggcttctactctgcctttatggttgcaaagaaagtggagattatcactaaatcatacagagacgatgcaaaagccgtaaaatggacttgtgatggcagccctgaattcactattgaagaaatagaaaaagccgaccgtggatcagatatcatcttatacattgatgacgactgcaaagaattcctcgaagaagcacgtatctccgaacttctgaagaaatattgcagcttccttcctgttcctattgcatttggaaaaaagaaagaatggaaagacggcaaacaggtagaaacggctgaagataatataatcaatgataccactcctttgtggacacgcaaacctagcgaactttcggatgaagattacaaatcattctatagcaagctatatccgatgtctgatgaaccactcttctggattcacctgaatgtggattatccattccatctgactggtatcctctacttcccgaaggtaaagagcaatattgaattaaataagaacaagattcagttatattgcaatcaagtatatgtaacagactctgttgaaggcattgtgccggacttcctgactttgttacatggagtaatagattctccggatattccgttgaacgtttcccgttcatacttgcaaagcgactcaaacgtgaagaagatttcaacttatatcaccaagaaagtttccgaccgtttacagtctatattcaagaatgatcgtaagcagtttgaagaaaagtggaacgacttgaaaatatttatcaattatggaatgctcacacaagaggatttctatgataaagcgcaaaaattcgcccttttcaccgatacaaatgacaaacattacacattcgaggaatatcagacccttattaaagataaccagacagacaaagatggaaatctaatctatctgtatgcaaataacaaggacgaacaatacagctatattgaggctgcaaccaataaaggctataatgtcttgctcatggatggccagttagatgtagctatggtaagtatgttggagcaaaagcttgagaaatcccgtttcacccgtgtagacagtgatgttgttgacaatctgattgtaaaagaagacaagaaaggtgaaactctggaagccaacaaacaagatgcaatcacaacagccttcaagagccaattgcctaaaatggataaggttgaattcaatgtgatgacgcaagcgttgggagaaaattcggctccggtcatgattactcaaagcgaatatatgcgtcgtatgaaagaaatggcaaatattcaagccggaatgagcttctacggcgaaatgcctgacatgttcaatctgatcctgaattcagaccacaagttgataaaacaagtattgaatgaagaagagaatgcctgtcaagcagaagtagctccgatactctccgaaatggataacgtcaacaaacaacgtaatgagttgaaagacaaacagaaggataaaaaggaagaagacatcccaacagctgaaaaagatgaattaaacgatctcgacaagaagtgggatgatctgaaaagcaagaaagaagctatctttatcggctatgcaagcaataacaaagttatccgccagcttatcgatctggccttacttcaaaacaatatgttaagaggtgaagctttgaataacttcgtaaaacgtagcattgagctgatttaatatcgcccctttaaacattacacatacttcaagaaagagcattcaacgttaaatacacgttgtaatgctctttttcaatttaaaacgatcggcaaaatatcgattaattgaaaagtattgtaccttaattccgcaacactattataaattaaactttttaagtacctgagcaacaaaaagttgctcaggattttgccatgtcagaattttcacttatcttagtgttgcaaaaaaaacaagagaatccgacgatagacatggcgaagatacaaattaaatctgagagactcactccttttgggggattattttcaatcatggagcaatttgactccacattatcatctgtaatcgactcaaccctcggtctaaggtgtagatcgttcggttatcagtacagcgaaatcatccgttctctcatgagtatctacttctgtagcggttcatgtattgaggatgtcactactcatttgatgaaccacctctcgcttcatccgacacttcgcacttgtagctctgatactatcctcagggcgataaaggagttgacgcaagaaaacatttcatacacatcagatatgggcaagacctacgatttcaatacggctgacactctcaatactttattgctcaattgtatatttgcatctggccaactgaaagagggtgagatgtatgatgttgatttcgaccatcagttcatagagacagagaagtatgatgcaaagcctacatacaagaagttccttggttatcgccctggcgtggcggttattggcgatttgatagtcggtatagagaatagcgatggtaacacaaatgttcgtttccatcagaaggacacgctgaagaggttctttgcgagatttgaacagaatgggctcactatcaatcgcttcagagctgattgtggatcatgttccgaggaaatcgtggaggaaatagaaaaacactgcaagtccttctatatccgtgctaaccgctgcagttcgatctacaatgacacctttgctctcaaaggctggaaaactgaggaaatcaatggcattgagtttgaattgaactctatccttgttgagaagtggaaaggtaaggcatatcgacttgtgattcaaagacagaaacggatggatggtgtgcaggatttttgggaaggagaatacacataccgttgtatcctgactaacgactatgattcttccgtaagagaaattgtcgagttctataaccttcgtggaggaaaggaacgtatcttcgatgatatgaacaatggtttcgggtgggacagattgcccaaatccttcatggcagagaacacagtgttccttcttcttacagcacttatccgtaacttttacaaggccattattcaaagacttgacgtaaagaagttcgggctcaatgcaacaagtcgcataaaagcgtttgtcttcaggtttatctctgtaccagccaagtggatcaggacatcaaggcggtatgtgctgaacatctatacctgtaataatgcttacgcagatgttttccagactgattttggataatgcctacaacttatgggaatgatattgtgtattgcctcaagtcacattgtggggtaaggggatattgtaggcagaagtgggtgcttcaagttcaaattatctgcaaattcagtaatgagaggacgtgtaaacgcaataaggacgttcaagggcttagttgcggatttgaggttgtatatatttgaacacttaatagacaaaaaattcaattgtttgatttgggttatgagaaagatttttttagtgttcattactttatggctgattatcccggctatccatgcccaaaaagtaggacttgtattaagcggtggtggcgccaaaggaatgacgcacatcggcatcattcgcgcattggaagaaaacaacatccctattgactacattgctggtacttccatgggagccattatcggctccttgtatgccatgggatactctcctgacgacatggtagaactgctcaaatcggaggactttaaacgatggtattccggagaagtggaagagaaatacgtatatcatttcaaaaagaatcttcccactcccgaatttttcaatattcgtttttcattcaaagattcactgaagagtttaaaacctcaattcctgcctaccagtgttgtcaacccgattcaaatgaatctcgtgtttgttgacctatatgcacgtgctacggccgcttgtaagggagattttgataaactttttgttcctttccgttgcattgcgtccgatgtgtacaataaaaaacagttagtcatgaaggaaggagatttaggagatgccgtcagagcttccatgagcttccctttcatgtttaaacccattgaaatagacaatgtactggcctacgatggaggtatctataataactttcccacggacgtcatgagagatgattttcatccggatgtcattataggaagcgttgtatccaccaatcccactaaacccaaggaaaatgacctcatgagtcaaattgagaatatggtgatgcagaaaaccgactattctattccggactctatggggattttaatgacgttcaaatatgacaacgtcaatctgatggattttcaacgcatcgacgaattacatgatataggatataatcgaaccatcagcatgatggattctatcaaaagccgtatccatcggcgtgtgaatctggacaatattcgtttaaggagaatggtataccgtagtaatttcccggaactacgttttaaaaatatcatcattgatggagctaatccacaacaacaggcatatatgaagaaagaatttcataagtcggataacaaagaattcacctatgaagatttaaagcaaggttattttcgattgctatcagataaaatgatttcagaaatcataccgcatgcaatttataatccggaagatgacacctatgatctgcatttaaaagtcaaactggaaaacaactttgctgtacggctgggaggtaacatatccacctccaattcgaatcagatctacctgggacttagttatcaggacttaaactactatgccaaagagtttattcttgacgggcaacttggaaaggtatataacaacgtgcaatttatggcaaaaatagactttgccactgccattcctacctcgtatcgtcttataggttcgatcagtactttcgactattttaagaaggacaaacttttttcgcgaaataacaaaccggcctttaaccagaaagacgaacgtttcttgaaattacaggttggattacctttcctttcgagcaagcgagcagagtttggagtaggaattgcaagaatagaggataaatattttcaaaaaagtgtcattgacttcggaaatgacaaatttgataaaagccgctatgatttatttggtggatcaattagttttaatggaagtactcttaattccaaacaatatcctacacgtggatacagagaagcccttgtagcccagattttcgttggaaaagaacgattctatccgggcgaaggaagtacgaccagtaacaacaaagatcatcactcctggctgcaattatcttatatgaaagagaaatatcataatatgagtgaacattgggttttaggatggtatttgaaagccctgtatgcctccaaaaacttctccgagaactatacggccacaatgatgcaagctggagagttttctcctacattacatagcaaattgacttacaacgaagcctttcgtgccaatcaatttgtcggagccggcattcggcctatttaccgtttaagccagatgttccatcttcggggagaattttatggttttatgcctatttatccaatcgaaaaaaactcgttgaataaagcatattacggaaaagctttctccaagtttgaatatttaggagaaatttctgttgtatgtcaattgccttttggagatatctctgcatatgtaaatcattatagctcaccgaaaagggagtggaatgtcggactaagtataggtttacaactattcaattatcggttcatagaataattttctacaaaaaaagtcggtgaaaagcttgctaattcgggaaaagtccgtatctttgcacccgttaaaacaaaataacggtcgcgtagctcaactgaatagagtagctgactacggatcagccggttacaggtttgaatcctgtcgcgatcacttttttgaattaacagaatggccgcgtagctcaactgaatagagtagctgactacggatcagccggttacaggtttgaatcctgtcgcggtcactgaaaaatttacaagttatattatttgaggtcgcgtagctcaactgaatagagtagctgactacggatcagccggttacaggtttgaatcctgtcgcgatcacaaaatcctctgcatttgatgtggaggatttttattttctcccatttcatcgaagaaattagctataactaaactaaaaagattcaaaagtcagtcattataaacaagcgatacatcccctcatatcttttattttcaattccctcttcaccttcacctttcttccgggctccctataaataagtcgtttacgggtgaagggcaactcttacacagcctttttcacctgtttggaagtaagcgtctccgcgattctatcttgtcggccttttttcattcttatatttttgctatgtataaaaatgaagcattatggatttagcagaaaatcgatttggaaaaacttggaaacatttccttgaagcattgaaagtagactacaattgttctttagccgatgtttgccgcgatcagcataccacttttggtggtatgagttcctggatgtccagacggggctatagcgttaaacaagccaaggcagatgtggtccgtgattattatggcggcgttgaaccctcccaaccgacaacttcctctccttcattcactcaaatagcacccgccatgttgtcggaagaagagtttagtcttgccgggatcacaatcacctttaacagtggaaccaccatttcggtcaaacgggccacacccggtggtgttattaaaatgttgcgcgattacgaaagaaaggagggagatccatgtattctctaacatcagccaatcgctactatctgtaccagggctttgttcgtatgaaccttggcattgacggtttattcaaaattatacgatcggaaatgaaggacttgtctcccgtttccggagatatctttttattctttggtaaaaaccgacaaagtgtaaaaatactgcgttgggatggcgatggctttcttctgtactacaagcgcctcgaaggtggaagttttgagttaccgacatttaaccccaatacaggcaattacgagatttcttatcaggttttgtcttttatcttaaatggagtgtcattaaagtctgtacggttgagaaagcgtttcaggatctaattcaacattctgattattagttatttgtgctaaagatatcatccggtttatttggccaattcgttgattttttatatctttatgccatgaaaaaggatgagatcatagagttattgaaggaacaaatcaagggattacgagatgacaacaacagactcttggaccaaatagatgctttgataaaggaggtttcttcccttaaagaggcactccttcaaaaaggcgaatctcttagcaagcaacagcgccttactaagggactcgccaaacttgtatccaacacatccgaacagcaacaggctccccaatctgccatatccgaagaagagcggcagaagatagaagcggaaaaagcagataagcgtaaagcaagaaagaataatggggccaaacgtgacatgcattatgagatggaggaagaagaacatgtcgtttatcccgatgatcccgattttgacatcaataaggcccggttgtttaccactgttcccagaatatgcgtccgctatgaatgtgtacccatgcgcttcatcaagcatgtctacaagatacacacctatacgcaagaaggtcgcctgtttgagggaaaaacaccggcttcggccttcttgaattccagctatgacggttcatttattgccggattgatggaattacgttatatacaatcgctacctgttgaaagaatcatcaactacttcgagagtcatggctttacgctgaagaaacctacggctcataagttgatagagaaagcctcaaacctcttcgaaaatctttataagtgcatccggcagacagctttgagtgatccttataaggcagccgatgaaacctattacaaaatactcgtcccggaaaagaacagcaagggaaaaggagtcaggaagggatacctttgggtggttgtcggcataaacaccaggatgatatacttgctctatgatgacggctcccggtctgaaagagttattcttaacgaattaggcagttgcaaaggtatcatacaaagcgatggttactcaccttaccggaagctcgaaagcgatgcttatcccaatatcacacgcatcccgtgcttgcaacatataaaacggaaatttatagattgcggtgagaaggacccggatgcaaaaaggatcgtggagctgataaacgcactttatcaaaacgagcataagcataaagttggggctgagggatggacggtagaacagaatcttatgcatcgaaaaaagtatgcgccggacatactcggagaaataaaagatgtgcttgatgaaatagaagaacggggggatttattacctaagagcgaactgcaggaagccattacctatcttcgcaatgagtggaatgcagtggtggacatctttaattatggtgacacttatctggacaacaatatggttgaacggatgaaccggtacatatccttatctagaaaaaactcattgttcttcggcagtcataagggggccgaacgaggcgctatactctatacgatagcactcacttgtaggatgcataaagtgaatttatttgagtatctcacggatgtgataaacagaacagccgaatggcaaccgaacacaccaattgaaaaatacagggaactgcttcctgacagatgggaaaaggctaatgactaaaaagggatcattagcctttttattttaatacactatatagaatcgcggagacgcttactttggaaatgaaatatgtcacaatggctattagaatttcttatcaagccctcaaatagctatgctttagataggctaaagcgtagctatccgttccctaaagctatgctttaggaaggtgaaaaacctgtatcgaaaaacgtaattaataagaaatataaccctttcacaatagacagcggctgtcttaaaataaatcattggctggtttaaaataaatatcccaatgattgaattcagtcattgggatatttattttaaacacttagatgtttattatgaattcctcgctgaagaaggcatcaacatttaatattcaactcattcaaaaccttgcgtattgcctcaaatgtggtaatgcgagtaggaactagtggcaaccgaagtttattctcgatcatacccatggcattcaacattgattttactcctgccggatttccatcaacaaacaataaattgaataattccgtgaatcgatggtgaatggttaatgcattggcaaagtctccttgaagcgccaggcgcgtcatacggctaaattcacgaggaaaagcattaccgattactgaaatcacaccaacggctcccaatgtaataagcggaaaggttataccatcatctccggagattacattgaaattttccggtttatttttaataatatcatccatttgcgtaatattgccggatgcttctttaatagcaactacattcttaaaatcgcgggcaatccgcaaagtagtttcagcagtcatatttacccccgtacgtcccggaacattatacaatacgatggggagctccgtagcttccgcaatcgctttataatgctgataaataccttcttgagaaggtttattataatacggcacaacagacaatatggcatcaactcctgtgaaatcatcatttttcaatgtttctacaatagcacgagtattattaccacctacacccaacagaataggaattcttccgttaacgcggtcaattaccatcttttttatagttttcttttcttcctcggtcagagtcggtgtttcagctgtagtccccagcacacacaagaaatccgcattattctgtaatagatagtccaccatacgcatcaacgcgtcatagtcaacgctctcatcctctttgaaaggagtaatcagtgctacccccattcctttcaatttagtctgtatcatgagttttaattataatctctaatttatttagccgcaaaagtacgaatatttttcttatcttacgatataagtttcagaaattcgtcttcgcttaatatggttattccaagtttttttgctttttcaagctttgcaggtcccatattgtccccagccagtataaaacttgttttcgcagaaatgcttcctacatttttccctccgtttttctcgataagctctttatattcgtcacgtgaatgatgaacaaacacaccgctgataacgatagactggcccgctaacttatccgtatatccgcttaaatcttcttcggtgcgataaagctgcagtccggcctcttttagcttggcaactaactcacgattagactcattcgcaaaatatgcaagtatactctgggctattttttctccgatttcatcgatacttaccaatttttcaagatctgcctgttgcagatcatctatattctcaaacgattttgctatctttttggccacagtctcaccaacaaaacgaattcccaaagcaaaaataacacgttcgaaaggaacggttttactttgtgcaatccccgttacaatgttctccgccgatttttctcccatacgatccaaacctttgatatcatcagctgtgagtttatataagtcggccgtatttctaattaaccccaagcgataaaacatatccacggtttccggtcccaatccatcaatattcatagcctttcgactaataaaatgctcgattttgcctttgatttgaggaggacacgctgtttcattagggcaataatgagcggcttccccttcatacctgactaatttactaccacattcgggacaattgacgatgaatcgaaccttctccccaagcataaaactacgtgcatctttatctactcccgtaatcttaggaataatttcaccacctttttccacataaaccatgtctccgatatgcaaatcaagtccttcgatgatatccgcattatgtaaggatgcacgttttacgacagttcccgaaagctgtacagggtccagattagctaccggagtgactgctccggttcttcctacctgataggtcaccttattcaatcgggtcaatgcacgttctgcctggaatttataggcaatagcccatcgaggagacttagccgtaaaacccaaatttttctgttgtctcaaactgttcaccttcaaaacaatcccatcagtggcaaccggtagatttttacgttctacatcccaatagttgataaattcaaagacctcctccaatgtctggcacttacgcgtcaaatcagagattttaaagccccattttgccgcttcctgaagattttcataatgtccgtcacaaggcagattatctcccaataaataatataaataagcatccagcttgcgagaagctacaatagaagaattttgcaacttcaatgtaccggacgccgcatttcttggattggcaaaaagcggttcttcacgtgcctctttttcccgattcaactcttcaaacacttcccatggcataagaatttccccacgtatctcaaaagaagcgggataattatcaccatgtaatacaagcgggatagaacggattgttttcacattatccgtcacatcatcgcctttttctccatctccacgggtgacggcacgaaccaacttcccattttcataggtcaacgaaatagaagtaccgtcatatttcatttcacaacaaatctcgaaatcctcatttagcgctttacggacacgatcgtagaagtccgtcacttccgcttccgaatatgtatttgccaatgacagcataggatatttatgagccacttgcgtaaaattcttgttcaagtcgctccccacgcgcatagtgggtgaattttcatctttatattccggatgtgcttgttccagatcctgaagttcacgcatcttatcgtcaaactctttatccgagatttcaggagcattcaacacataataattataattatgccgatgaagttcggcacgcaattcctctattttttcttttatatccatatttcttcgattgtttaaggcaaaaatacatgtttatctttgaatatttgtacttttgcgaaaaattaaaagattatgcgcattgatattataacagttttacccgaaatgattgaaggtttcttcaattgttctatcatgaaacgagctcaagataaaggacttgcagaaatacacattcacaatttacgtgattacaccgaagataaatatcgtcgtgtcgatgattatccttttggaggatttgccggaatggtgatgaaaatagaacctatcgaacgctgcatcaatgctctaaaggcagaacgtgactacgatgaagttatcttcacgacccctgacggagaacaattcaaccaaccgatggccaacactctctctctggcacagaatctcattattctttgcggacactttaaaggcatcgattaccgtattcgcgaacatctgattactaaagaaatcagtatcggcgattatgtattaacaggaggagaactagcggcagcagtgatggcagatgctatcgtacgtatcattcccggagtcatctccgatgaacaatccgcactttccgattctttccaggataatttgctggcagcacctgtatatacacgacctgctgattataaaggctggaaagttcccgatattctattatccgggcatgaagcaaagatcaaagaatgggaactgcaacagtccctggaacgcaccagaaaacttcgtcccgacctattaggggagtaaaataaagtgtaaataaaaacgacggtgaagattacgtaaatcctcaccgtcgtttttattttatcttcaatctaaagattctgtccgtagacaattcctctaaacacgaacttctttttcatctgccactacctgcctgtttatcctttctttatttaaaagagaaatagcatttttcttgcagacttaatgcgaagggttattgtatgttttcaattatacctcaagcgcaccaattatttcctttacagacttacatccgtgtctttccaggtaattatttataccatcttccactttaatagtcacagcaggatctatgaaatttgccgtaccaatttggatggccgtcgcacctgcaagcatgaattcaacagcatctttccagtccataatacctcccaatccaatgacaggaatatttaccaccttggcaacttgccataccatacgtaatgcgataggttttacggctgctcccgacattccgcctgttatagttgacaaaatagggcgtttacgttccgcatcaatcgccatacccagcaatgtattgattaatgacacgctatccgcaccactttcttctgctgcacgagctatttcagtgatgtccgtaacgttcggggagagttttacgataagtgtctttttgtaagctgaacgcactgcttttactacttctgacgccccttttgctgacacaccaaaagccataccaccttgctttacattagggcaagagatgtttagctctatagcaggaattttgtcaagttcattaatgatttcagctgtttttacataatcttcgatggcagatcccgaaacgtttacaatcatattcgtttggatgtcttttatacggggatatatatgctccacaaagtaatcaacacccttattttgcagtcctacagcgtttaacatcccagaaggagtctctgccatacgcggataagggtttccttcacgtttgtgaagagtagttccttttacaataataccacctattcgcgctatatcaatgaagtcggagaactcttcaccatatccaaatgtaccagatgctgtcatcaccgggtttttcatttgtaattcaccaatgtttacacttaaatctgccatagtagtttatttatattaaaaacaggaccttctttacatacacacaaatgaccttctgtcgtattttccacacaacataagcatgctccgataccacaagccattgtattttccaaagatacttcacattctatctgattacttttggcatattttgccacagccaccatcatcggtttgggaccacaagtgtaaatctgctcaaatcgtaccttatttaatatagaatgttgggtaacatatcctttttctccatggctaccatcttccgtggtggtatatacctctccatatttggcaaactcttccagctgcaacagatctttgtcgctacgggcacctaacaggaacgtaggtttatggccttttttagccaactgctcacctaaataaagcataggggctgttccgacacctccaccaactaataagagcttatcagaagcctccagaggcattgtatatgcatttcccagtggaagcactacatttattgtttcaccgggattaacctctgccaaacgtcttgttccatcaccaaccagctggatcagaaaccagacctcatttcgctgtttatctacaaaattaatagaaatgggacgccgtaagaatgtagtaggcgaaccgtccacccggagttcggcaaactgcccaggtaacatttcgggcagtaatgactgagaggtcaattttagcaatacatagtttgcattcaatctgatattctcggtcactgtcagatctaaaataaatttcttcatgtatggatataaaagtataaattcgtattccgggtgcaaagatacaggaaattgctcaaaccaccgattttactcttcatttttcaggtcgaaacgtctcataggtattatcatcgaaaaatattcttatttccgtgattttcctggcaggcttttctatatacctaatctcctgttttacaatctctttgggggcattttcggcgtttcttaacggcgtttccttgcgattttccggaagagtcggttctttggacggatttacgggattctcgtcgaataaagaaggcagataatcgtgattagaagaagaaaaggaagttccttcttcagacaccatcatttcgcccttaccataaagcaaccattcaagatttacatagtcatacttttgatgaaccttcataacgacctctaagctgggtttattccgatcatttaaaatatgagagagagtagattgttgcactccaattgtttcagcaaaaactctaggaggaactttttctctttccattatcattctgattctgtcttttatttccatactaccttctttttattacaattgtatgtgttatgtacctatttcacaaaaatacgcactatctcattgattatacaaaggtaaataattagattcacaaaagcaaattacaaatataaaaatattaatattacaaaagtgtattatattatacaaatcgaatattacgcttgtatatagaataaaacgagttattataagcatatagctttagtttaattatatatcataaaatacagatatacaaccatatatataacacaaatgaaactcaaatagagacattcacaaatatacataccacatatagaaggctcttatagcactaattgatataataaactatataatcttgatttataataagataatagagataaaagtatttgttaatgtctgaaaaactacatttgtatatagggtattatttttgtaaatgcataaatatattattgtaaacaccatcttttgattacatttggaattcattcacataaatatacgacacatttgtaaccacataaatacacaaaagtaaatattgatagttgcaaaagcaataaaaggaagggatcaactcatactttaccaatgtatattgctatttttttctaatcatcctttacaatcttctctaaaaagagaatccttgcaatatttccgtaccgatctccacttatttattttttttcaattctaggaagctcatttttagcataaacaaatgaaatacaaatacttacccctataattcagattctatttttctattaaactagaaaaaataggcttatagtaatcaaaaatactctggattatcaaaatgacactaatggatgattttagagaaaagaaaaaatctccattctcactataaaacgatacctttaaaatccaaaatgcttttttgataaactcaagaataagtaaacttttctcgtttaaaaattaaagctcctatttaaaagaaaaagtttccttgaagatagatcaatacaaaattctaaaaatatactttgtgtagttcgttaaatgggtaactctataaaactacaaaaggagtaaatctatttgtaaaataatcactggcattgtgaaagtcttttttataatggaagtaattgcgggaatacaaaaaaaaagacatatacttcccgtttctatctacggtaaaagtatatgtctgattatataggtaattcttaatcctacttaatgcaaaattttgaacactaattcacgaagaatatctccatctgtcatagaactattttggactcctttggattttgcatcagcatatcgtatttctccaacaatctgcatcgtctttactccgctatattttcgcattgctgccatataatcccgggcctgccagggagttcttagtcctagcatatttgcgatcccttgctctgatttatccggtgcataataagccaacattagattggagtaaaagctgaataataaagacagcgtcatttggattgggttagttttcggattttcctcaaaatattttattatcttatttgctttcaatatatccttttccactaaagcactgcgcaattcaaagttattataatctttgcttatgcctatgtttttttctatctgttcaggagttacgcgtttttgcccggcaggtaaagtgataatcaacttttcaagttctccggtcagacgactcaaatctgaacctacaaaatcagcaagcataacagttgctttaggttccatatcaactcctttccgtttcatatatgaagctataaaaccgggaagttgtgcatcctttatttttttagattcaaacagtacaccaactttgtccacctcggcagccagcttctttctacgatccaacgttccatgcttatggcatatcactaaaatggtggaaagcaaaggcttttgaagataatacgacaactcttccatattacgtaccgcctgtgcttccttaactactactacttggtgttccgacatcatgggataacgctttgcagcatttataatcgttgccacatccacatcagccccatacacaacagtcaggttgaattctttttccgtctcactcaacacattatccgttatgtaatctgcaatcaagtcgatataatacgactcttctcccatcaggtaatagatagggcgatactgctttgctctcaattccttgaggatgtcatcacaggtcagttcttgttttgccatatataattttcagaaagaccggattaccagtcgaatttcaagtgtttaacagttttcttttcatcaataatcatgcgcaaagaagcaataccaatttcaacatgctcttctacataatttctggtaaccaaattatcacttctatctgtttttactccgtcgggggtcattggctgatcggacactaataataatgcgccggtaggaatatgattggcaaagccacaactgaacaaagttgcagtttccatatcaactgccatagcccgggtctttttcagatattctttgaatacatcatcatgttcccagatacggcggttggtggtatatacggtaccggtccaatagtcacggcctttgtcacggatggatgaagaaacggcacgctgcaacataaatgcaggtaatgcaggaacttcgggaggaaaataatcgttagaagttccctctccacggatagctgcaatagggagaatcaaatcgccaagctgatttttcttgtcgatgccaccacattttcccaaaaacaaacaagccttgggttgaatagctcccagcaagtccatgatgatggcagcgttaggacttcccataccaaagttaatcatagtgatgccttcggcagaagcagaaatcatatttgcatcccttcctaagatgggaacattaaactgatttgcgaaaatctcgacgtacttgttgaagttagtcaacagaatatactctccaaaatcctccaggttacgttttgtgtaacggggcagccaattagctacgatttcttcttttgttttcataattatctattaaatttgtgctcccaataatgggaaccattatttaacttacaaaaataataaatgttatcgttaaacctaccagtattcgacactaaaataaacgtacgaaacggaaaaaatgtaattttcgacgtaattcgtaaacgatatgtcgcccttacccctgaagaatgggtacggcaacactttgttcactttcttattgcacacaaaggatatccgactgcccttctggccaatgaagtaatggtaaagttaaacggtactaccaaacgatgcgacaccgtactttatcggagggatttatcagcccggatgattgtggaatataaagcaccacatatcgaaattacacaggctgttttcgaccaaatcacccggtataatatggtactgaaagtagattatctgattgtcagcaacggaatgcaacattattgctgccggatggattatgaaaaccagagttatacgttcctccaggatattccagattacaaatctttataaaaatgatccgcttcattcgccttaaaaaacatacttacctgcaagaataaaatagcgtcactatccgttcaagatagtgacgctatttgcttactatggtgacaccatcccaaacagatggcgtcactataccaactcccctttcaggtagtcttcaaacagccttttacttctatacggcaacatctttctcactatcctcatttcctttctttttgctgaatcgctcttgcaatttctgcatgaattcgtagaaattaggaatataaatggtagccaataaagtattcatagccataccaaataccacagcggcacccaatgctatacgactttgtgcacctgcaccggtggcgaataacaagggcatcactcctagtacaaaagcaaaagaagtcatcaggatcggacgcaagcggacatgccccgcttcaaaggcagcttccctaattgaattaccctcggcacggaaatcacgggcaaattccacaatcaaaattccattctttgcagaaagcgcaaccaacaggattataccgatttgcgtataaatactgactggagttcccataatcagacagccaatcatggcacctaataaggctaccggcaatccgatgacggctgctaccgggctggtccaactttcatactgtgcagcaagtaccaggaaagcaacaattaacgccataatcagaacaatggtagtagtattccctgcctgggtttcctgataggcaacggaagtccattcatacccaaactcatctcccaactgttccttaaacaatgcttccacttcttgaatagcctgcccggtactacttcccggagcaacattacaagtcagagaagcagtcgagtacatattatagcggttaatctggttctggcctaactgttcctccactttggtgaaagaagaaaaaggcaccatctctcctgtcgaattcggcacacttaacttcaaaacatcatcaatcacgcgctgtgcctgatcgcgtgcctcgatcttcacctggtaaatacggccgaattcaacaaaatcattcacataagccgctcccatataatagcccaatgtagagaaaacatcgttcaaggcaattcccatgaactggactttgtcacggtcgatattcaagaaatattgaggaacatttgcttgatactgactggatacagatgctaaagccggtttcgaatgataagaagcaagcaaggcattgatggcctgctgcatttccgtcggtcccagattacgccggtcttccaactgaagctgcaaaccaccggatgcacctaaccccggaatagccggaggaaccatggcgaacacttccgcagcctgaatagtcatatacgcttcaccattaaaacggttaactatggcagcagccgtatgctccttccctttcctctcactccagtttttcagtaccacaaaataagttgccgagttactctgttcgccaccacccatgatagaaaagccggaaataccaatataattctttacttccggataagaatccagaataccgtttatcttttctcccactgcttgcgtacgctcaaggctggcggcaggcggaagttgaacaacagcaataaaatatccgtcatcctcgtccgggataaaagttgacggccaatgcataaaaagcaatagagcaataacagtcaaagcgccataagaagcgagagccattcccggacgttgaagcaaccatttgacaattttgtcatataccccttgtgtcttgtcataagccttattgaaacctttgtatataaagaagttagaaggtttactcttttcaagaaacagtgcgcaaagcgcaggagtcaatgtcaacgaattgaaaccgctcaatacggtagaagcggcaatagtcagcgcaaactgcttatacagctgacctgaaattccactaatcatcattgttggaataaacacggcaagcaatacgagaaccaccccgacaatcgggcccgtgatctctcccatcgcttttgtcacggcttcacgaggtgagtactgcccagtttccaataatctcgaagcgttctccaccaccactatcgcatcatccaccacaatagcaactgctaaaatcagtccgaacaatgttaatgtgttgatagagaaaccaaatgccgccattacggcaaatgtaccgatcaacgataccgggatagtaatacaaggaataatcactgcccgccaattctgcaggaacaagaaaataacgagtatcaccagcaaagttgtttcaaagaaagtaaccatcacttcatcaatggaagcatggataacatcagtcgtatccaaagtgacattataggccactcctgacgggaaactttctgcaagttcttccatcttagctttcactccttttgaaacatccagcgaattggaacccggttgctggtaaatagcaatagcagccgtaggttttccattcaatcgcgacactacactgtatgaagcagaccccaaatcaatgcgtgcaatatctttcagacgaagcatcgccccgtcctgctcacggcggataataatattcccgaactgttccggagatttcaatcgtccctgaacattcaacgtatactgaaaagcattattattatcctgtccgataggctgaccgatatatccggcagatacttccacattctgcgactggatggattgatagacttgctgcggtgaaatattccgtatacgcatagcctccggatcgagccagatgcgcatcgaataatcccctgctcccatcacattcacagcacccactccgggcacacgtgtcaactggtccactaaattcaatttggcataattagtcagatacaggctgttgtacacagagtcctgcgaagtcattgtcaaaaacatcacaatgtttgaagattgtttctgcacagtgaccccttgcaccaccaccggttccggcagcgatgattgtgcgatacttaccctgttttgtacctgcacagttgccatatcgatgtccgtaccaacagcgaatgtaatagtcagagaatatgctcccgaagatgaagaattggaagacatataaagcatgccgtctacaccattcacctgctgttcgataggaatacccactgtttgagcaacagtttcagcatttgccccgggataaaccgcagagacctgcaccgttggcggtgtgatctccggaaattgcgccacaggcaatatattgagtgtgaccagaccggctactacaataagcagggcaaggacagtagcaaatatcggtcggttgataaaaaacttagaaaacataatgtataggtttaaaagcagtctctccacaaccttctcccaaggagagggagcagaaagttacttttgttaattaatcggttttaagtacatcacctttattgatttcgtttgttaatcaatcagttatccaaaagaccttatttccctcttttgggaagggaatcaggaagcggctttactttcattccgtctctgactttcatcaaagcctctgtgacatactgttcctgcggggaaagtccacccaatacctgccgtaaagtgccgtcgaccaactgccctatttcaatatgccggtaatgaactatattcgaatcatttacaatatataagtatttgcctaactggtcggttccgatagagccctctttcaccaacatggcatttttagcttctccataaggtaaagttatgcttacatataatccgctcttcaatatccctttcgggttatcaaaattggcacgaaccatcagtgttcctgtattcacatctacatttggtgaaagataatcgagcgtagccggataactttcagttcccccctttcccagttgaaccattatttttttaggaagatcagtcggtaactgctgggtatccatcgtcattgccaaccattgattatcagcaacattaaagtaagcatacatctgattatctttataaatagtagccaatgtgactggttgcaacgaaccgcctacataacttcctatatctacagtcgccttactgatggtgccgtcaaacggtgcacggacataacaatatcccaagtttgtacgggcggtgctcaaagctgcttccgcgttgctgacagctgcaacaccctctttcacagaagattcagcctgaagtacctgtatctgactgaccgcatcactctttacagcctctttcatacggctataattattacgagcatattccaattgcgcttgggcagttttcagttctgcttctgcttgctccacctgatctttatataaggttggttcaatgacaaacaacagttgcccctgtttcacccgtccacctgcgacataagaggtagactgcaaggttccgttcaccctggctacaagattcaccgtcttttctgttgtcagataacccggataatctttcgtcaaagtaatatcctccactatgggtttggtcacactaatttccggagttggcatacctcccatcgctcctgtacttttcttctccttgcaacccgtcaatataggcagtgcaagaaagatatacatcagttttttcatatctgttaggttatatattttatagattgatttttattctctccaaccaccccctaaagccttgtagagggctatcagttgcaaaagcgaactaccttgtgcctgtaccagctgattctcataagataacagagaacgttgtgcatcaagtacgttttggaaaggcgaaagtccctgtttataaagttccagtgaaagtttcaatgtctcaattccttgattgcgtacttcccgcagggctacaatctgtttgattgaattccggtaggaattcatagcattgtccgtttcctgtacggcagttaaaaccgtctgattaaactggttgatcgcttcatccagttgtgcttttgccagccgggttgcattcaccagctgtcctccattgaaaatagtccagttcaatgacggagcaatttcataagtcatacttttacttttggtgagatccttcaggtcacgggcggcatatccaaatgaacctttcaagaaaactttcggcaaccaatccgctttcgaagctccaagcaatgctgcctgcgcatttacgctcaattccgcacttcgtacatcaggccgtcgcagtaataaatcgacaggcattcccactccgataggttccatataatcgggcaatgtaccactagattcaagaacaggacgaatgtcctggggatacattcccaataagacagccaatgttgtgatatactgattgatacccgcttccaactggggaatggaggcttttgtgctatataatacagacttggcctgtgccacatcgagtttagcaaccagcccggtgttatagcgtacttccgtgattttcaggacttcttcctgcgaagcactgtttttcttcaccacttcaagctcttgttgcaactcccttagattgatataagccgaggctacttctgcagctaatgagaccatgactccagtgtattcttccttgctggcggcaaaattctctttctgcgcttttacccgtttccggatactgccgaaaatatcaagctcccagctcatgcttagcgaagcatcataataatgatcggttgtttggggcagtgaacttgtatttccactggtttcctgacgggtccatcctgcattcaatccgatggaaggaaaaaagttactgcgttctatccaaagattggcacgagcggcagctatacggttgattgccatggcaacggagtaattacgatctactgccagagctatcaaagagtccagtttggtgtcttggaatgacttccaccaatggtcatctaccggaagtatctgttgaaacacttctccgctctcttcccaatcttgaggaagcggagctttcaaataacggtttgcggtctgtccaaccgcggtcacagttgaaagaaacataaggagcgatgtgccccacactcgtatattcatatcagttcaggtttttatgaaatgaaaagataacaactaaagggtaagtttgtttatcgattccttttatacgagcacttgttaaaacaaaaaaagcccagcattgctgcagggcttattatatatcaaaaaagtaactttacttacttcactgctcttcttattcagcagtttttcttctgatagctcttttggtagtagctaccggagcttcttccaccttgtgttcgatttgtacgccagccaattccgggtcaatcataatacgtccgcaatattcacaaacgattactttcttacgagaacggatatccagttgtctctggggcggaatcttgttaaagcaaccaccacaagcgtcacgctgtacgtatacaatacccaatccgttgcgagagttcttacggatacgtttgaaagactgcaacagacgcggttcgatcttagtttccaaatctttagctttgtctctcaatttctcttcttcctgtttggtttcagagataatttcgtccagttcgctcttcttctgctcaaggtctttcagtctttcgttaagaatctgatcgttcttcgttacttcagcctctttttcttctttatcagcagaatattccttaattctcttttcgcaaagttcgatttccaatgtctggaattcgatttctttcgtcaagaaatcatattcacggttattgcgaacattgtcttgttgtgacttatatttttctactgaagcctttgctgtttcaatttctactctcttgccggcaatagcagatttcagttcatccacttcagctttgatcttgtcgatacgggtactcaaaccagcaatttcatcttcaaggtcttgcacttccaacggaagttcacctctcaatgtcttgatttcatcaatcttagacaacatcgtttgcagttggaacagtgtcttcagtttctgttctaccgtcaactcattcggatctttttttgcttctctagccattttacttataaatattttatgggattcgtatttattttactcaattggagtgcaaaattaggaaataaatcccggattatggaataaaaaatttcttttgtatattgttcgctttcgtaatgaccaatctctgccatcagaatatcaccctcatggccgaaataatcatgatatttgatttctcccgtaataaagacatccgcccccatccgaattgcctgtggaagcaggaaagctccggcaccaccacataaggcaaccttctgtatttctctccccgtcagtttgttatgacgtacacaacccacttcgaagattttcttgatgcgtttcagaaactcgagttccgtttccgattcatccaattcacctacaattcccgaacctgcctgcaaccagtcattctgcaacggatacaagtcgaatgccggttcctcataaggatgtacagacaataaagcctttataacttctgctttcttatatacaggaagaatggtttcaatccttacttcattttcatgatgcagttcaccgattgttccacagaaaggatgcgttccctcttttgcccggaaagttccctctcctttcagattgtaactgcatgaatcatagttacctatatttccgcatccggctgcaaacaatgcttcacgcacactatcggcttgtgcatccggcacgaaagtcaccagcttaatcagactgttctctttcggttcgagcactttcagattcttcaaccctattttctctgctatcttataattgactccaccttgtgcattatcaagattagtatgtgctgaatagatcacaatatcattctttattgctttcagtatgcagcgttccacgtaatctttgcccgtgatagatttatagcccttgaaaatgagcggatggtgcgatataacgagattgtaccccagcgcgatagcttcatccaacacagcttcggtaacgtcaagacacaacaaagcccctgttgcttccgcttctgtcaatccgatttgcaggccggcattatcaaatccgtcttgcaatggcagaggcgcgaatcgttcaagggcgcttactatttccttaattttcattattggtagaaaatttggttgcaaagataataaataaaataggaattaacatactaagtgatcgttttttagagaatttatcgttatccattttttgagatccccataaaagatataaaataccacccagaaactatcaaaaaggacctaaaaactatctgttgatagaaattcccctaaattacgtctgattctcccctaccaaggtcgacaaaatatcttaaacttgcatcatcaaaatttttacaacgaatactcacatttaaaaaacaacacatatgaaaagtttaagcttcagaaaagatttggtaggagttcaggaagaattactacgtttcgcatacaaactgacaacagaccgcgaagaagcaaacgatttgctgcaggaaacctcattgaaagcattagataatgaagataaatatacacccgatacaaatttcaaaggatggatgtacaccatcatgcgcaatatctttatcaataattatcgtaaggtagttcgcgaccagacatttgtcgacaagaccgataatctctatcatcttaatttgccgcaagatgcagggtttgaaagtactgaaaggacatacgacctaaaagagatgcaccgtgtagtcaatgctcttccgaaagaatacagggttccgttcgctatgcacgtttccggattcaaataccgcgaaatagcagaaaaactgaatcttccgttgggtaccgtaaaaagtcggatcttctttacccgtcagaaattacaagaagaactgaaagacttccgctaaaccataactatatccatataaattttagattaaacagttaatttcatttttcagttttatcaataggcaaaaggcaaaaagagtttatattctttttgccttttgcctgttttcatcggataaattcggataaaaaccggttccggaataaaaactaattataaattttcgcctaaagcttccgttatttattgaaattctgtacttttacttcatctaaataatgaatacgatgaaaacaaatttgactttactgttcctgttagttatgatgatttcttgccagcccaagaaaagtgatagtatcgaaatgtccgtagccgaggctgcaaagattgacaatatcgaagattgtgcggcagatacggtcaaagctaccgctatcttctggattgataaagtagaaaccaaacactgcaaagagtacggttttcgcacaatcaaagctaaggtgctcattcgcgaagacgggaaggttgatttgctgtcattcgtcaagaaacaatcgcctgatgtagagaagtatatacgccatcacctctctaaatttcaagtaacggaaaagatgtttgaaggcggttatgtgcaacccgaagaacaattcgtgcagcttcgctgcttatggggaatgttgaaaggcaaataataaacacgctaataaccggttagcttttgcttttcatttgcaccttatttatcatttgtaccttgtttttcagtgcataccgttcgtctacgactctgtccgtagggaagaaagtgaaaataagccgccactctccttccttatagataaatttacgtccactggctccacgaagaattacttcgtatttttcctgcaggaaagcctcgatatgttccggcatttctgtgccggatgctgaaaactccactgttataaagaagtgtggaatagctatttcagctactttatggaatatctggtcaataacagtcatttcctgggttcttttgttacctccagcagttttccgtatgcatcaaaagattgacgcgaagccaatgaaatagtaatcattagcgatagcatagatgctgtgaaagtaatcaccataatcatcatctgatacttgatagcgacattcgggctgcttcctcccagaatttgtccgatcatcgtgcccggaagagccaccaatcccatcacggcaatgttcgcaatcaggggactaaacgatttaatgatggcctgccggataaatggagcctgcgcttcctgccttgttgctccgtttcccaataaataccgatatagttgctgttcacgtttcaacccactataataagtattcaaagctattacattgctcgacagcatattacccatcagaattccaaatattggaataaagtattgggcgctaaatatattatccaattggagaacaataccgataaaatagatgcctaccaatacaacactacaaagaaatcctaccgtaatagggattaataaaacactacgtttcaactgggtacgtaccaatgcggtctgcccggccacgaataccataattatcacccaaagaaaattaatccagggattgttccataaaaagagatatttcagatacatgccgataaagaacagctggataatcatccgtaatgtaccaatcacggcaggtttcagcaatcccgttttaaatttccaaaggtaaaaaaacggaatggcaagcaatagcagccctataaagagattataatatgatatatcaatcgttcccacaatatattcttaacaattctatccgatttgcgttacagttcaattaattacagttctattaaataatgacagcccgaagcaaagtccttatcatgtgatacggctaacacagtcgttcccctttccgcctgtcgccggaaaaaagacaggactttaccggttgatccggcatccaaagcagaagtcggttcatctatgataatgagaggtttgttgagcattgcagccacagccagcataatacgttggcgttgaccacccgatacttcattcaccctctttgtatataattcgtgttccagccccaattcatcgaaacaagtgaaaagtctttcttccgaaaaaggaacagaacgattcactttcagtccgaacgggagagccaccatctctttgacccattcaaaaggtagtgccaattcttgaggaatccatgcaatctgtctgcggacactatcgatagtcgatatatcaagcaatgtttcccctacctgtatagatccttctttcaaaggcacaaaccccattaccgcattcagcaacgaagtctttccacaaccggattgaccgacaatgcaagccgtttctcccctttccagcttcatactgaaaccggagaaaagcacttccgtaccaaaagcaatacaggcattattaatatgtaacatctatttgttctcttgaaaatcctgccaaaattatatttattgaagttccgccacccacttctcaatgtttcgtgtttcagcactaaaattcactccaatcttaaaaagtgttcgcccatcactttcgaaaggtttagcataatgcttttcattgatctgctgcaaggcttcttcagccgtaccctccagcttgaattccatgacatagataaatttatcagtctgcaaaacaagatcgatacggccctggctcgtgtgatattccgcttttacataaaaaccgactaatttgaacacgataaagaggacattctgataatgcaattccaaatcgcgaaccaattcataaggagtatctgcaaagaaactctgaagacgacggaaaaaagaatcataatctcccgaacggacttcgcggacaaacttctgaatctcaaaagatgattctacggcatttatattggcataaaaaggcatgagatatttcacaaaaccttcctccacttcacgattgggaaatcccaggcgataagtttcaaattcacgatcgtagccttttatggtaagataaccgctctgataaatcacagggataggattgtcggaagttgaatcaatactattcagtacgtcggcactggtttcttcatgagccatccggtgaagatcgtaatgatgtttttttagtaattcgaccagataagtaggtgtgcccgtttcaaaccaatagttgccaaacacattatatttaagggtattaagtacactaaacggattatacatacctatagaatcatgagtgaaatgataaccatcatatctttcacgcatttctgtgcaaatttcatcatacgtcaaaccttgcgcatcggcaaattcatgcaattcagtttcaaaattctcatgcaactcgcgatcactgattccgcagatttctatatactgctgacgcatagaaatatcctccagattattcagatcgctgaatacacttacctttccgaatttcgtaactcccgtaagcataccaaatttaatgcagccatccttgctttttaaagctccatagaaagccttcaatgtatcacgaaaactcttctggagttcatcattaccaatcgcctgtaacataggcttatcgtattcatccacaagaataacgacactctggccctctttctcacaagcacgctgaataataccttgaaagcgggaagcgaatgttttctcataatcctgtgcaccataaagagcttcccacccccgtaaagcactctctaaaacctggtcgagtgcttcaggattcgtatatttctccgcattcagatctaaatgcagaatgggatatttgatccaatctttttccagtttctctatcgccaatccttcgaaaagtccttttttcccctgaaaataggcttccaaagtagatagtaacaaacttttcccaaaacgacgtggacgactaagaaaataataactgccagttttcaccatttgatatatccaagcagtcttatctatatagcaataacctcctttgcgaattttctcgaagttctgtatgccgataggataaattttattactcatatactcataactttataagttgacagatacaaagatagccttttccacccaataacacaaagtccgatacgaaagttttttcatatcagactcaaatgatagcccctatttatttcatcatctagtgtaattttgccaattttcatttatctttgccttactaattaattcaagaaagttatgatactgaacgaaagagacgctcgtcacgagcatatattgcaggtagcacgtcagatgatgacggctgcgcgcactgctccgaaaggaaaaggaatcgatattatcgaagtggccctaatcacagatgaagagattaaacaactgtcggacactatgatagctatggtagaagaacacggaatgaaatttttccttcgtgatgccgacaacatcttaagtgccgaatgtgttgtattgataggaacacgcgagcagacacaaggcttaaactgcggtcattgcggcttcaccacctgcgtcggacgtaccgaaggagttccctgcgcattgaacagcatagacgtaggtatcgccataggttctgcctgtgctatggcagccgatttgcgtgtagacacacgtgtgatgttctccgccgggctggcagcacaacgcctgaactggctgaaagactgcaagatggtaatggccattcctgtaagtgcatcctccaagaatccgttctttgaccggaagccaaagcaagaaacgaattcataataatacgtaatgatgcgtaacaggcacactgacgactgacgcagacaataaactgattttataaaaaactaaatatatatagtctaatgggaatcatggttggactccccagcccaagcggctcggagaaagatttgcagttgaacttcggcaaaaacatgaccgtacaggtagaaatgagagcacctcatttgcctgccgaatggcacatgcagagcggtatacagttaacatggccacatgccggtacagattgggcctacatgctggcggaagtgcaagagtgttttatcaatattgccagagaaatagcgaagcgtgaattattattgatcgtcactcccgaaccggaagaagtgaaaaagcagatagctgccactgtcaatatggataacgtccgctttctagaatgtgccactaatgacacatgggcccgcgaccacggagccattacaatgatagataccggcaccccttccctgctcgacttcaccttcaacggctggggactgaaatttgcttccgaactggataatcaaattaccaaacatgccgtagaagccggagccttgaaaggccagtatatagaccacctcgacttcgtactcgaaggaggttctatcgaaagcgacggaatgggtacattgcttaccacttccgaatgtctgctctctccccaacggaacggacgactgaatcaggtagagatagaagaatacctaaaatcaaccttccacctgcaaaaggtgctttggttagatcacggttatctggccggtgatgataccgacagccatatcgacactttggcacgcttctgttctaccgacaccatcgcttacgtgaaatgcgaaaacaaagaagacgaacattacgaagcactgctcgcaatggaagaacagctgaaaacattccgcaccttagcaggagaaccctatcacctattggccttacccatggcagacaagatagaagaagacggcgaacgcctgcctgcaacttacgccaatttcctgattatgaacgacgttattctttacccgacatacaatcagcaggagaatgacaaaaaagcaggagaagtattgcagcaagcctttccaaaccatcaaataattggaatagactgccgtgccctgattaaacagcacggttccctacactgtgtcaccatgcaatatccgctgggcgttataaaggagtcataaaagaattacaaaggagcctataaaggaattataaaataatgaatgaatcaacccactaattattcatcatgagaaagataaaagtcggaatcatccaacaatccaataccgcagatattaaagccaatctaatgaacctcgcaaagaatatcgaggcttgtgccgctcacggcgcacaactgattgtgctccaggagttacacaattcactttatttttgccagacagaaaacactaacctgtttgatcttgccgaaccgattcccgggccttccacaggcttttattccgagttggcagcagctaataaagtagtccttgtcacctctctttttgagaaacgtgctcccggactttatcataataccgctgtcgtattcgaccgcgacggaagcattgcaggaaaataccggaaaatgcatattcccgatgatccggcttactacgaaaagttctatttcactccgggagacattggttttgaaccgattcaaacttctttaggaaaactgggcgtattagtatgctgggatcaatggtatccggaagctgcccgcctgatggcactaaaaggtgcggaacttttaatttatcctaccgccattggctgggaaagcagcgacacggacgatgaaaaagcccgccaactcaatgcctggattatttcacagcgcgctcatgccgttgccaatggacttcctgttatctccgtcaaccgtgtagggcacgagcctgatccttccggacagacaaatggtatcttattctggggatacagttttgtagcaggaccacaaggggaatttctggcacaagccggaaacgatcacccggaaaacatagtagtggaaatagatatggaacgttcggaaaacgttcgccgttggtggcctttccttcgtgatcgtcggattgacgaatatgatgggcttaccaaacgctttctggattaaagacttacccacataccttcatcgcaggaggtttatctaataaagaaaaaaagaagaggttgtgtcaaaacgttggcacaacctcttttatattttacagttctgctatattttcttttggctatgctgctttttcctcatgcatttggcaacaagttgctatattccaattatatcgggttataaatagtcccataaacatatatttggcaactgtaatgagcccctttccttcttttatcagtttagcacacatttttttgatattaaaggctatagcaaagaaagcaaagtccattgtaaccttgtcttctcccacatgccggaatcttctgtatgccatgttgtatttcatttgtccaaacacagcctctggttctatacacctcctgcctctatgcttgataccttcttctgagagcaacctttcccgtgcctgccgtttgtattgatttaatcggtggttgacttctataatacggttcccccgagctttaaaacaactgccacgcaaagggcaaccttcgcatctttttgctttataccgggcactttcgatgatgtatccgctcgctgtcttgtcacgtttggttcctatacggttcatgtgctgtcccataggacaaacgtaataatcctcttgggcattgtaatggagactttcggcatggaatgggttgggagtataacgaggacgctgttctttatggaagtaattgtacttgatgaaggcttctatcccattctcctgcatgaaccggtaattttcttccgaaccgtaaccggagtctgccacacagatattcggtaaacggttatagcggtactggaaagagtggaaaaaaggtatgagggtcagtgtatcggtagggttgggaaacagacggaagtctgtgatgaattggttttcagtacctatttgcagattatatccgggtttggtctgcccgttcttcatggcatcttctttcatgcgcatgaatgtggcaccaggatcggtcttggaataggagttacgttctccaagggtatcaaggtgattgtcgtattctatcagcttgtcacgatacccttcaagttccatgacctgcttcttctttttgcgcagggctttcttttcttccttatcctttgttgcaggctggcgttccagggcttctttaagttcatccactatgtcagagagcctgcagggagtaaactccacggatgtgtcttttatagagttctcctgtgcaatggcttcatccacctgttccaagagaatacggattttatccattagtctcgtacggttccgttcgactgtcttgcgccagacaaaagtatatttgttggctttggattcaatcttggtgccgtcgatatactccacatcaaggctgatgaaaccttcatcggcaaggacaagaaccaactgggtaaatacattatttatttcctcctttacacggttacgaaaacggttgatcgtgataaaatccggatgctcattaccggcaagccaaatataatgaatgtcacgaaggaggtgcttctctattttacggcaagaatagatattattcatgtaggcgtagattatcaccttaagcatcattttaggatgataaggacaacggcccgtttccttataaagcttcttgaaactctcaagattgagattgtcaataacagcattcacgatgcggaccgggtcggtcgcaactatgttttcatcaattctttgtggaaaaagaacggtttggttgggaatgtaaggacgaaaatgtaactttgccataacgaaaaactttatacctaaagatacgaaaactttgggtaataacaaagcccgggcttgagaaagtctgggctttgcgcataaaaaaaggctgtgtcagcgttttgacacaacctctttcaatatatcatcataaataactatctcattgaaacgttatttttttgttggctaggaaattagcccctccataaataaacaatcctaagaattgagccagatattcattcacgtccaatccttctaccaataacacaagaaataaaaactgtgcggtgtaagccacggcaaaagcagagcaaaagagtagtatctgtttccagatactattctttttattttctacggggaatatccagtatttgcaccagataaagttatggatttgagctatcagatacgctgttatattagccaccatatagtcgccgtcaaatgacatttctttcatcattaaccatacaaccaacgccataatcaaagcgttcattgtaccgatgactataaaacggaatatgcgtacagattctttcactcgccctctttcaaatctacgatcaaattcagttcatcaagctggctctggtcgattgcagagggtgcgtccaacatcacatcacgtccggaattatttttcgggaacgcaatacagtcacgtatagaatccaatcctgcaaacaaagacacccaacggtcgagtccgtatgccaaaccaccgtgaggaggcgcaccatacttaaaggcattcatcaggaagccaaactgtgcctctgccttctccggagtgaatccaagaatctcgaacatcttcgcctgcaatttcgcatcgtggatacggatagatccgccgccaacttccacaccgttgattaccatatcgtatgcatctgcacgtacagctgccggatcagtgtccaacatcggaatgtcttcctctttcggatgagtaaacggatgatgcatagccatcagacggccttcctcttcgctccattcgaacatcgggaagtcaatcacccaaaggcaaacaaacttattcttatcacgcaatcccagttgagcacccatttccagacgaagctcgcaaagttgtttacgtgttttcattacatcgtcgccagacagaatcagaatcaaatcacccggtttagctccgaatgcttctttcatttgctggagcacctcctgcgtatagaatttatctacactcgatttcaccgttccgtcggcttccacacgggcataaaccattcctttcgcaccaatctgcggtttctttacaaattcggtcaatgcatccagttgcttgcgggtattagtcgcagcaccttcggcgcagtatccgcccacataagccgcattatcgaatacagagaatccgtgacctttcatgatatccatcagttccacgaatttcatgccgaaacgcaaatccggtttatcgctaccataatatttcatggcgtccgcccaagacatacgttggaatggttcattcagttccacaccacgaagagtcttaaacaaatgtttagccattccttcgaaagtagagataatatcttcttgctcaacgaagctcatttcacagtcgatctgtgtaaattccggttgacggtcggcacgtaagtcctcgtcgcggaaacatttcgcaatctggaaataacggtcgaaaccggaaaccatcaacaactgtttcaaggtctgcggagactgcggaagtgcatagaactgtcccggattcatacgtgacggcaccacgaagtcgcgtgcgccttcaggagtagaaccgatcaaaacgggcgtttccacttcgatgaaacccagactatccagatatttgcgaacttcaattgtcattttatgacgcagttccaaattggaacgtacagcgttacggcgtaaatccagataacggtatttcatgcggatatcatcacccccatccgtgttatcttcgatagtgaacggaggaatcatggcagtatttagtacgttcagttcggaaacaatgatttcaatgtctccggtaggaatgtttgcattcttgctgaaacgttcattaaccgttcctgtcacttgaatgacgaactcacgtcccaatttattagcacgttcacagagttcagcattaatttcttcattaaaaaccaattgggtaattccgtaacggtcgcgaaggtcaatgaaagtcatccctcccatcttacggctgcgctgtacccatccggacagcgtgacttgcttgtttacatcagagattctaagctctccacatgtgtgcgttctaaacatatattttttatttaaacgattatcactcgcgtttttattttgatcgaaccaaaactgcgcaaaagtacgcaataatttgtaattcggtgtcagtaatccgttattttatcagactttctttgtcagctttttcaatattttcttgtttctatctgttatattgtcaacgatggcttcattcatcaatttgatgccattcatatattcctgcgctctttggagcacattggctgcatccttttccggtgctcgtggcactaccacgcgcaatcctctttgaatcagctgaatatttacattggcatccgtttccatggggtcaccatcaaaatgcacgacacccggagtagtccggcggatgcacaactgcttgcagcggaaagtcttgatacggctattctgatcgattgttttattgaataattgaaaggccaatgaaggaacgtccaatatggtgaacggttcgagaatagtcacatccagcaaaccatctgtcagagtggcttgcggtgcgatataagcattgtttccatattgcgacgcgtttccgcaggcaatcaggaaggctttatacttggaaactccgttttccgtttccagttcgtacgtttccggctcatatttaagactttcctgcagggttttctccagataagtcaatagcccccgtttaccggcatgcgcaaacttcagactgacaaacgcgtcgaatcccactccgcaagtgcagaaaaaatccgtaccgttaatcttaccataatctatcacatccatgcaaccttcgttcagcacttccaatgctctcttcggttccatcggtatatgcagatgcctcgccagtccattgcccgatccgcagggaataattcccagcgcggtatcagtatgcaccaacgaacgagctatttcattgattgttccatccccaccaatagccactactatatctgttttctcttcggcagctttggcagctatttctactgcatgaccggctctttccgtatacactacttcccaagagtatctcgccttgtctattttttcgtccagcaagttaagaatcaattctttactttgtgttcccgaaataggattgacgacgaattttatttttttcattctttcgttcatgctattcttgtcgattgtagacgacaaaagtaatataaatatcttaaattttaatctattagaggtttctaatcatacgagagcaacttttttctcttaaaaagaacagataaaagcaaattttgttatctttgccccctgtttttaaacacttgttaagataaaaggatgtaagatcgtcagcgaacgatctgagtatgagtataataaattataattcatgggattattacaagagaagttagctaagtacgacctgccacaaaagtttatggcacagggcgtttacccatatttccgtgagatagaaggaaagcagggtacagaggtagaaatgggcggacacgaagtgttgatgttcggttccaatgcatacactggccttacgggagatgaaagagtgattgaagcaggtatcaaagccatgcataaatatggttccggttgcgcaggctcgcgcttcttgaatggtacgcttgacctgcacgttcagttggagaaagaactggctgcctttgtaggcaaagatgaagcgctctgcttctcaaccggttttacggtgaattccggagttatccctgctttgacagaccgcaatgattatatcatttgcgatgaccgcgaccacgcatctatcgtagatggccgtcgcctctccttctctcaacaactgaaatataagcataacgatatggcggatctggaaaagcaacttcaaaagtgcaatccggattcagtgaagctcatcatagtagacggtgtgttctctatggaaggcgacctggcaaacttgcccgaaatcgtacgcttgaaacataaatacaacgctactatcatggtagacgaagctcatggcttgggtgtatttggaaaacaaggacgtggtgtttgcgaccatttcggtctgactcacgaagttgacttgattatgggtactttcagcaaatcactggcttctatcggtggatttatcgctgctgattcttctatcatcaactggttacgtcacaacgcacgtacctatatcttcagtgcatccaacactcctgctgctactgcatctgctcttgaagccctccacatcatccaaaatgaaccggaaaggcttgaagctttgtgggaggctaccaactatgcattgaaacgtttccgtgaagctggctttgaaatcggcgcaacagaatcacctatcattcctctttatgtacgtgacacggaaaaaactttcatggttactaaattagcttttgacgaaggggtatttatcaatccggttattcctccggcatgtgcaccgcaagatactttggtacgtgtggcattaatggctactcatacaaaagatcaaatagaccgtgctgtagaaaagctagttaaagcatttaaagcattggatcttttataatctacgagaaatatatcactcttatcgggtgaataaaataaaagtctgacacaaatcaatgtgccggacttttattttatcttattcacccttaagtacttccgccggattttgctgggcggctttccatacacgccagatgatgcttaggaaaatgacaaatcccattcctatgaatatgactgcatagagccaccattctatcggtgtttgctttatataattttctagccaatgtttcatcatgacatatcccaacggaaaagcaaagaacgatgaaaacacaagtaaaagtaaatattctctaaagaatagattcaggattattcctatattggctccatttaccttgcgtatagctatttctttacgccgttgctggcaggataaagtcaccaatgaaaatatgccgaatacggcaatcgctatacatataaaagaaactatgctcaacaattgacacaaagttctctctgatttcatataagtgtcataaacctcttccatattagacaacatcaattctgcatttggattaactttattcacttccgcttttatcttttctgaaacaacgttccaagtcccttctttcactttgaatataatacctcctctgcctgtattatccggcaaaaaaaacatagcaggggctaccgggtgtattggggcattatatgaaatatttttaataacccctttcactatataatgccttcctaatttatcaattttctttccaaccggttgtgtccatccgaaagctttcacagcagcttcatttataacaaccatattttttccatccttttcatccagcatgcttccctccagcacctcaactccaaagaaatcggcatattcttgattgatcgtctcatcttctagatctatatattgctcactatcagttgtctttccttcccactcctttatcctgaatgttgaaaaatacattttgggaataggtgtctgaaagccactcaaatactttgtaacatcgggcatctgttctaatatttctttaaaaggaacattttcagagcaataaacaacagctcccacattatgccgttctattccaagttctttggtattcaacaagaagttaagttgcttcatcatcaccaaagtacaaaaaacaaaggctataccaataaacaactgaaataaaatgctactcttataaaaccaaccggagagatgaagattagattttttgtttatattactaagtagagttcgcttgctaatgtatcgtataagcagagatgcaaaaccaactgtcacggcaatcaatgatagtatataaacaaatacttcgatataaaaaaatgaaacaccctcattgatttgtgacaaacgtttaaaagtcggcaggatgagttctatcaataccagccctattcctgaagataaaattagtaacaagacaagttctgtaagaagtaaagtgagtaacccaccatttgatgaaccattgactttcctcaacgctaactcacgtttacgcatccagatacgagttatcaacattgttaaataattacatattccacaaattataaccaaaccgctaatacatgcaaaaagacgaatatgattcaacttcacattcacatcttccctcggatgactactccgcaatgtggataatggagcaataagcgtagaatttggatatttatgaccatcttgttgtacttcatattctgacaatctctgtttcaatgcttctatatcacagttgggataaatacgaaaaagcgtttgacatcgttggttcccccaattggggtttgtatcatgaaatggcaataatatatcaaatgaaaacaaagagtgtccttcccatgactttacaactgcaacgattattttttcttcgttactttcctctaaaatcaagtgtttacctatcggagattctttcccaaatattcgctttgccgtattttctgttatagcaatttcatccttttttagctgtagatggttatctccatccaatactttaatattaaacattgaaatgaaatttgaatctacctctatacgtcgtaccacaaactcaacatcctcattcttaatctttttttcattccagtcataaaatatacgacatactttctctatctccggacaattctttgccaaataatcagctagaaaactagatgaattataggtaaatccgtctccataaagacgaaagctactgcctgccagataaatgcgatcggctccctcatgaaaattatcatacgtcatttcataacgtatccataataccgacagcgcaaaacaggtaaagccgactgctaatccaataatactaacaagactttgtgttttatactttatcagattacgaaaggctactttcagatagtgttttatcatgatattgttattttattattcatttttgataacttccgccggattctgtcgggcagctttccatatgcgccagatgatgcagaatagaataataatcgccattacagcgaaaatccctacatatacccaaccgttaatcgcagtttgtctcacatacgtttcaatccattgcctcataaccacatatcccattggaaaggctatgacagcagcaataatcagcaataggaagtattcacggaaaaacatctgcaagatatgacgaatttgcgccccgttcactttacgtatggcaatctccttttgacgttgctcacacgatagagtgaccaatgaaaagattccgaatacggagatgagtacacagaccaatgacacgaagctcaatagcttcatcagtgcatcttcggaacgaagatatttaccatattcctcctcctcgctaaacaaccgtaagtaagcattgggaaattcttctttgtggagtttttctatagcttcacgacattcattccaagtcccctctttgaatttaaaaaggatactggcacgattcaggagatactcttgtgcttcgggacgctggaacgcaataagtcccggtttgctggtaggagaacgataactaaaattcttcaccactccgacaactttgtatgcaatatcctgacgaccgttgatgttattgccgaaagtctttcccaaagcatgtttccatccgaatttcaggcacgtactttcatcaaccacaacttcattctgcaggctcttttcagatataaattcaccttccagtaattttaaatcataaaacttaaagaattcctcctttgccggcattatgccaacaagcagtgttttttctgtcactttgggtagcccatcccaattggttatttctacatacatcatcggaccgactggaataattggaaagtacacaggaggtaaagtttcggttaccataggcaaagcttttattttctccacccattgattaatgtctccattccacaatgccacattagccacacgatgacgttccatacctaaatccgtatttttcaggaaatatagttgcttcatgatgacaactgtgcagaagataaaggcaaggctgacaatcaactgtacgataatacctattctgcgaaataagtacggacgggcagtagcaacacctcctttgattgtttcctgcaatgttcgacgacgaaaataggataatggcatcagtgcaaacagaaacgacaggatgattactgccagaagatatactaagatttctccataatatgagctggcttctatctgcgtaaaattcaaaaactgggacatactcatctccaccagcagcaatccgccgatcagagcaatacataaaagcagcaataattcaatggcaaactgtacagacaaagctttattgcttgctccattcaccttacgaagtgccatttcacggttacgcatacaaagccggctgataaaaagcgtcagataattgaataacgaacaaataatcaccagtccgcccgccaaggagaaatagaatatataactgaaagagataacaacatctgctttatctacataatccgaatagcgcaaagctgacatccgggtaatcaacaaatcggaaagttcgctctctttctcaatatcgttgatgcaaacagtgctcatttttgttcggaatgcgtctatatctgttctttcacgtacacgaataaatagctgctcattcgaacttccccaccgaggagaatgtcttgccggagccagtatattatatggaatattggaatggttagaccatccactcacaattgctcctattttacatacgcgtctgcctacttccacctctttccccaatgcatcctcttctttgctgaagagccgcttcgcaaattctttagtgatagcaacttcctgaccatcacatttcaggaagttgacagtacctttcaataattgtatatcaaagaagttcatgaaaacagaatctgcggcaatcattccgatctcctgctcagtatcttccatacggaattttacatgatgtgcggtaaaagcggttacagcttctatctccggcattttgtcttgcaaatatttcattaaaggatatggagtaaatttgcttgtaccgggttcattggcgtaatgcgcacgcaccagataaatgcgttcggcaccctcatggaagttatcatacgtcatttcataacgtatccataaagcagacagcgcaaaacaggtaaaaccgactgctaatccgataatactaacaagactttgtgttttatactttatcagattacgaaaggctactttcagataatgttttatcatgatatactttttattgatagcttgtgcttacatactaacttcggtcaccacctgtccatcaaacaggtttatgatacggtcggcataaccggcatcgtgttgtgagtgggtcaccatgacaatggtggttccctctttattcagttcgctcaatagccccatcacttctttaccgtttttggagtccaggttaccggttggctcatcggccagaatcagtttagggttggccacgacggcacgggcaatggcaacacgttgctgctgaccaccggaaagttgttgcggaaagtgtttactacgatgagtaatggccattctctccatagctgactctaccctctttttccgttcggcagcggaaatacccatataaagcaaaggaagttcgatattttcgtatacgttcaactcgtctatcaggttaaagctctgaaatacgaagcctatcacgcctttgcgaagactggtacgttgcgactcggtataccgggagacttccgttccgttcagataatactctcctcctgtcgggttatcaagtagccccaaaatgttgagcaatgttgacttgccacagccggagggacccatgatggctacaaattcaccttgtttcacttcgatactgacgttattcaacgcccaagtttctacttcttccgttttgaaaatcttctgtaagtcaatggtcttaatcataactgtattgtttttagaattattaattttattcgtttttgattacttctgcgggattgagacgtgcaatccgcagtattttaaagataatggtaattactgtcaataaggttactccccaaaatatgcttccccaatataatattccatcattaaaaaatacggtgtacatttgtttccacagttgcaataccacgtaaatgagcggaaaggtgatggcggcagtcaccatcagcaaaatcaggtacaaacgtgcaaacagccagatgatggaacgtattccggctccgttcactttgcgaatggcaacctctttctggcggcgttctgtatcgagcgtaatgctggaatacactcccaacagggtaatgatgatgcttacaattgcaaaaaacgagatgatatctttcagaatatattccactgcctgcacttcgtacaaatcatcctgaaatgtacgtacttgggaagaaatattctccggcagcacttcacgacggatggtttccatccatttcatgacttctttttgctgttcagggtaacatttcacatagcagtgacctatgtattcggaagaatcataaagtgtgaaagcatatccgccattatggttatgtacatctgtttgaaagggggcacatactccacaaacggtgaaatcagtggtctggtcgtaaaggttcattccgataatatctttcttttgtttcttctgccagactccatccattacgagatccttttttgtccggatcgtcctgccctccattatcggaatattcataaaggtgaagaaattcaatggtacacacattacattgatatcaatccaagagttgtcatttcctttctccgtcattaacaagtttccggataccccgtgagtataagatatatcagataacaaaatgtctttcacaccggcatgctgcctgaaacgttctaccatttcctgtttttctttgttttccagaaatggatagtccagcgggatacttagaatcgcttctttatcttcctgacttaacgtatgaaataaagtttcagtcacctttcctgattgcaaaaacaggctgacagtcagcgctacgaatatccagcaaataaagaactggacgccgagcataaagttacgtccccactgtttcccgcgacgtttttgacctccatagatacctgtctgtatggaagacctgcgaatacggacggataccagcagacagactgccacgcaaagcaatgcaagaaaaacaatgtattgcagaatatgctttaatagtgtttcaggagggaaagtcattgtgaggcctggcaaagagaaatccattctatctccaattagttcgataccccatatcaccaaaaatgaggatgtaaatacaatcatcagtgactgtgttaataacaggcagaacagtcgtttccagtcagaaccaagcattttcattatggcgtattccttagtgcgattcaggaaagagccgatgagaaaatgaaagaaattaatcaatccgaccaacaatatcaatatgccgacaattccggtgacccatcccagaatataaatacctttctcctgcgaccgatctcctatataacgggcaacaacggtataagtctcgttatatagactataagtatagtcgcgcttggaaaattgtttttccaaaccggtaatgccaacctgcggagataacaaaacgtatgtccgggctcccgttatatcgcgacgtttcggactctgaaaaagtccctcactgtcgttgataaccaatgcgtcggtatgacacataaaattaaaatcattgttcagtggaagatcttccatcactgcttggattgtgtacacaatacctcctgtctttggtgtactgtccggagaagtataaagccgtcttgtaagagtcaggtgtttgccaatggcagtctccacctgaccaaatatctttatggcagtggaccggcttataataaccgcgttgggcatccggcttgctgtccgccagttaccaactaccatttgcggagtaaagactttattgtatagggtatcgacttctataatttcaagatcgtatggcaatgatttatccggagacagttcaacctgaaaagagcgttcacggggatatgccatacaagagatcgcttccacttcacccatagcccaagtacggagttcttcggataatgctacttgtgtgccggaaaaatagtcaccagtctgttcattatagagatttaactcggctatgcgggaataattgtcaaagcaatgattggtagattctacaaaacgactgcaatacatacatatactaaaacacagtagtcctactgccaatccgatggtggaaattatattctgtgccttgtacttccacaagtttctaaatgctactttgaaatagtgttttatcataatatcttagattcattcagtttttataattttagcaggatcaatatgcgcaatcttgtttatttgccagaatagagtccctaaagaaataccaccaaccaataacaaagctatcaaaaagattcctatacctataggagctttcactacaaaatcctttgtgtattcatatatcagataccaggataatggaagagctactgcaaaagccccacctaatatgacaagatacttgcgtcctagtaaaagatataaatctttcagtgatgctccattcactttgcgaattgcaacctcatgggaacgctgcctgatgtcaaataatgaaataccaaacaagccaagacaaactattacaatagctatacaagcaaaaagagcataaacagaagctatctggcgatcatttttataaagttcagccacatcgtccttcaacaaagaatatttaaaatcctctgtaccatacactttcttttgaatacttttcaaatagtcaataactgcctgttctttgccggagtggcaatatatctgatataaatcaccgtctaattgactaccaaccataaagaccatcggatggacacctgtactaatatgtccgtcataataatcgtctattacagcaacaataggttgagccggaaaatccgggacgtttcttttcatcatttcatcaaccagcatagctccctcacattgcgtatatcctaaggctttcaatgccgcacgatttacaacggccactctatttcttgagtcttcatccatttccggcagacttccatccacaaacgcaagattgaaaactttaaagaaatcaggagtaacataagattgcaacaacgcaactgtttctccttttacactttgaaagtttgtagaataatagtctcccaaaatagatgaatgtcccgtcgtccaatactgaatatccggacaactcttcatgagttggtctatttcagtaatcctctcttgccgttgtttgatagtctccatagtgtaaactgcgaaatctcgtgattcatatatcaagtttgcttgaattacagactctacacgaaaaccaggatcggtatgtaacataaaattcagttgcttgctgaaatagattgataataccactaacaggaaagtaatcatatattgcagaaaaagaaagatcatacgtgaacgaaccgaatggttatctgtacctaccttccggattgaaacagccaacaaagaacgttggcactgcacaaacgcataaatagatactaacagaggcaaaaacaacaaaatagagaatgataatatcccatcaaatgcagtatacatcagctgactgccaaacatggatgatacaggaatatttgtcacctctacaatgagccaggctactatcatggaagcagcgatcaataaaaagttttctatgaatatttgcttaaacaacgcttttctatcagctccaaaaactttccgcaagctatacaccttacctcgtttcaccatcaataccagataaagattgatgaaattcatcacacctgcaagtaatatcaacaggcaaattcctcctaaaataaatagttgggaacggtttccgctaactagcatatctggtccggatcgaccaattaaagcccgatcccaatacatatcacttataggaactagagagaaagtgtatttccgactatccccgctacgagcatcctgattgataaaccggggataactcccggccttattggctttcattacttccgtttctgaagtgaaacggataaaatccaaaggcatacgctcccataatgatgatagttttgaagagaggaccaagtcaaaattaaacatccgcttattaattggttcctctaatatgcctgtcaccctaatctcctttccattcgaataagtgagaatcttgccaataggattttctttgccgaaaagttttttagcaaaaccctccattaacaaaactgacgccggatcttccaaggacactgaaccttgtaacacacggtaagggaaaagttcaaaataagcactatctgctgccatagcttgaacaggtatacgatttgactgataggtcaaataatcattttcgagcaacacgatgcgtgaacgcgtcactatgccactattatcaatgtaaacactatcccggctccctatttcggcaacacttaatacccgatttccttcaaacattgtctgtacaccatacacttgattacgatcgatacaatgtgtgtctactgtaagctcacgatgaatataacgaagcagaataatgcaacaagctaaactaaaggccagcccgaacaaattaataatagtatatgactttgtacgcaacaaaaagcgtatcgcatagtgcaatgttttcatgttttatctatttattatttttcattcatttcaagatcaattcttccgcatcgccaaaggtatcatatccggtggtaattacccaatctcccggctgtaaaccttctactatttcatattgttgcggattctggcgaccaatgttcaatggcacgcgaactgcttttgtctttgatgcatttactttgtaaatccattgtccgcctgtaaactgatagaagttgcctcgtggaataatatgtgcttgctccggctgtcccaattcaatctgtacccggaagctcttgccaactcttacattatcgggcatatctccggtaaaaataagatcaatatcaaacatacgatctttcacttcgggaaccacttttgttattttcagcggatatttgtttccttgatagttcacagtagccggtagtccggtggtgatccggtcgatataatattcgctaagtgaagtgtggattttgtattgatcgagcacttttatttcagcaatgctttcaccggaggaaacctgctgccccggagtgacctttacgaaactaagctgacctttcagtggagctgtgaccaccaggctattcagtcgttcgcgagtacgttcgtactttttccgttcccgctcccggtcgttacgaatcaattccttacgtatcatcgtgacagcagaatcatgtcgcaagctctcttgttgcagggctgcgtttttctgcttgtaactatactcatcttcagctacctgcaactgcgccttactcttcactcccatctgaaattcttcgcggtcgagagcgatgctttttttcaggcgttccaattcgtagctatttgtcagggcttgctgtttcaagttcagacttttttgttccatttcaatctcctgctcctgataggtaatcatttgcttttcccattcgtcacgctggtcttcaatattgcggagcaaatcgggattggaaagaataagaatggtgtctccctgctgaagcaaacttccctcttcaccgacaatcctttccacgcttccagtttcacgagtattgatcttgatggtcagtataggctgaatgagcccttccacatctacatattccatgaaatcagactctttcacttctgcaatctgtatattttcggcatctatccttagttttctgggacctaaagacaaagtaatcacataaatcaaaaaggcggcaaataaaagccctcctatcagatagtatctgtaacgaatgtaccacggtttcttttctaattttatatccatgagattatctggtgttttacaagtttctattaattagggttccatcactattctttactgacttttcgttgttctctattcaatcagaagatggtagtcttctgtcagtatcgtatttcgctcaaaatcgtatagtgtcatgctacggagtgtataatataaactccaataattatataaagccgaaatatagttacggcgggcactatctttctctgaaatggaagcattcaagtcaagaatggtagatttacctaatagatagagtttgcgggccacttcacttcttcgttgagctgtttcatctgtacgggcagcgatgcggacacgttgcgtttgcagattgaattgtttgacgagtttgcggacattcagttcaaagtctgtccggctctgttcgacttgtgtgtacaccaggtcacgattggaacgggctactcgcacttgtccttttccacgcccccaatccaggatagggagagaaatgccgatacttatgtattgctggtctaataaatttcgataggcgtcgggtagtttgtcggcagtctgcgttaatccgaaacggagatagatatctgctttcaggccggcattggcacgggcttgcgccactgcactctcactttccagtttccgcctttccatcgtctgtatgtccggactgttttcgtaagccagtgccagtgcttcattcaggttcacactgaaatccggaatttgaggactgacaaggacacgtaattcccgatcttcgtgaataccaagataggaacggagttcctgcatacaattatccatttcaataagggcattcatgcggtttgtctcttccgtcaaacggttaagttccagttgcagcatttcattttctgtgatggtacctatgttatagcggccttgcgcataacggtaaagtgtatcggcattggcgtaattaaaggaagcaatatcgtaatcgctctgggcggtggccaaggcaaagaatttattaatcgcattggctgatacgagttcaagcgtctctacgtagcttttctttgcctcctgatagcgcacgggctctatccgtctatcccatttcaaactattgtagccaaaaagagactggcgataaccgatcataatgggggaagtctgccatgagtatttatgttcgctgaacagatccatgcgttgagcggaggtttcgagaaagaaagagccaccggtccaggataagttctgtgaaagattcagggttaaatctgtattcaatagattttgttcgacaaactttaccgaaccgtctcccatcgttatcttgttaatggcacggttcagattcggatcggatgtcaggcttaaagacggcagataattggcacgataatatttatagttccaatacgcagaacggaaactgtggcgtgccgtctgtgcatcgggagattccatacgggcaatctctatgacttgcttcaatgacagctctgtggtttgatcttgagcagtcaatagttctgtcaacaatagtccgagagatatgaagattaatttcagattcattcgttggttatatttgttatttatcattcaaaagatgtgccattcagataaacaattatcattcaataatatagtaatattcctttcattcattcagtgtgcatatacgcacaaaattagtgcgcaatcgcacacacaacacatgagatttatccatatctttgctcccggagtttaaatggatagaagatatggaagaagtcaacaaattaggaaagatactcatagtagatgataacgaggacgtgctctttgccctcaacctcctactggaaccgtatacggagaaaataaaggtggctactacccccgatcggatcgagcatttcatgaccacctttcatcccgatcttatcttattggacatgaatttcagccgggatgccatcagcggacaagagggatttgaaagtctgaagcagatattgcagcttgacccacaagctattgttatttttatgactgcctatgcggatacggacaaggccgtccgggccatcaaagccggtgctaccgattttattcccaagccttgggaaaaggataaattgctggctacgcttacttcgggtatgcgactgcgtcagtcacagcaggaagtcaacatgctgaaagagcaagtagaaattcttagcgggcaaaatgcttcggaaaatgatattattggagagtcaccggccatgcaggaagtgtttgccacgataaataaactaagtaatacggatgccaatatactgattctcggagaaaacggtacgggaaaggatgtgattgcccgactattatatcgttgttctccacgatacggcaaaccttttgtcacgattgacctgggaagtatacccgaacaattgtttgagagtgaactgttcggtttcgaaaaaggcgctttcaccgatgccaagaaatcaaaagcgggacgaatggaagtggcgaccaacgggactttgtttttggatgaaattggcaatctttcacttcctatgcagtctaaattactgactgctatcgaaaaaaggcaaatcagtcgtttgggaagtacgcaaaccattcccatcgacgtccgtttaatatgtgccaccaatgctgatatccgtcagatggtggaagacgggaatttccgtcaggacttattatatcgtatcaacacgattgaaatacatatacctccactccgtgaacgcggcaatgacatcatcctgcttgccgaacactttctgaaccattatgcccgcaaatataaaaaagaaatgcacggactgacacgggaagccaaaaacaaactgctgaaatatgcatggcctggaaatgtgagagaacttcaacatacgatagaacgtgctgtaatcttgggagacggctccatgctaaaacctgaaaacttcctttttcatgcgacacctaaacagaaaaaggacgaagaaatggtactgaatctcgaacaactggaacggcaggccattgagaaagcgctccggatcagcgacggaaacatctcccgtgctgccgaatatttagggattacccgttttgcattgtatcgcaaacttgaaaaattaggcttatgaaacgatttgagttcaaagtagcattgcacatcttaattatttttctgctttctatcggcagttgtctgctgtatcaaagacagttatggttcagcactaccgtctgtattctctttttgataggtgccggtatgcatctctaccgaatacagttcaagcaaatcaccttgttacgacgattgacggatggacttcgctacaacgatatgacgcagaatcttcatccgcctttcaaaaataagatgatggatgagtgggcacaggagctttctaatgcattgaaggactttcggggaaagttattggcagaggaagtcaagcatcagtattacgagagtttattaaataaagtagatactgtcgtactcgtaaccgatgcttccgggcacattgaatggatgaatcaggctgcagtggcccatctggggcaaatatcacaactaccggacgtacttcaggaggcttctatcagcaatgatatgtccatgatccgcatcgagcagaatggtatcgttctggaaatggctatttcctgcaccacatttgctacacaggggaagaaacagcggttaatcagtctgaagaatattcattctgtactggaacgtaatgaaatggaggcctggcaaaagctgattcgtgtattaacacacgaaatcatgaactccatcactcctattatttctctttcggaaacgttaagtgaaaggggaatccccgaatcactcggagaaaaggagtattctgctatgttgcaagctatgcagactattcacagaagaagtaagggattactaggatttgtggagaattaccggcgactgacacgaattccgatacctgtccgtactaaagtatctgttgcagaattgtttatggacttaaagaaattattcccggaagagtatattcatttcgaaatgcctgcatctgatttatttttatatgtagaccgggcacagatagagcaagtgcttatcaacttgttaaaaaacgcccgcgaaacatgcgagcgaaaaatagataaagagatacagataaagtttttctctaaagacaacccgacattaacaatatctgataatggcgagggaattctaacagatgttttggacaagattttcgttcctttcttcaccaccaaaacatccggttcgggcatcggattgagcctgtgcaaacagatcatgactttgcatgacggaagtattaacgtaaaatcagaaatagggaaaggaagctgttttattcttactttccctaaatgagaaccaccgaaagcctcccgaatcctttaatacgatgattagtctgggtagtagaggaattacttatcctctactacccagactatttgtatcgggatttaattccttaacagcctctttgaccgctttattagttggcttgcgatatgcttccgcttgttgaacggggacaatctcattcaccattctttcatatcctttttgctctaacaagtgcacttctttttcacctgtttctttttgttttcttgttttcataaggcttttcattttaaaattcttatttataaaacagaaaacatcgaaagatagttcatactcacagataatttatgtacggggcaaccacccccaatataccattatgagcttgttcactccggtacagttatgagcaatttaatattctttctctataataggcacaattcttccatccccttcactcttcctctgtatcaccgattaacagggagttttcaggtgaagagccgttctttcaccttcttttcatcgtgaacaaaatcaaatagccgcttaccctgattacatcattgagcaagattagtcaagctatttcgttattagtttcaaccccatttgaaactaaaagtttcacgccttgaaacaaagtgtttcaaggattgaaactatttttgaaacctaatcgcttacaggtgaagaggtggtgaagttgttgcccttcacccgcaaactccctattcatcgaagagacagagaaaaggtgaaagaggagatgaaaagatgaattacgatgtccgatgatacttctaatctctgacaagaaaaaaaagtgagaccgcaaagtgatgagattcaaggtattgagaaataataggtaaaaaacattcgtttagctattgttaattaaaaaatactccctatctttgcaccgcttttgaaaagaacaacccttcaaaaaagtagcggggtgtagcgcagtccggttagcgcacctgctttgggagcagggggtcgtgggttcgaatcccgctaccccgactacaaaaaagagggttattaagttcaaagtttttcggggtgtagcgcagtccggttagcgcacctgctttgggagcagggggtcgtgggttcgaatcccgctaccccgacgaagaaaatcaagtcaagattcacaaaataaagccagtacaattagtattggcttttttattatatataggataagtgtaattatccccgtttgggggcaaataaaaagggcaattctttgaactatctttgaacaggtttctagcattatcctcattttcttatttaatttagagtaaaaatctattttgttaactttactgcccttttattttggcgttatcaatgttttgcgttaactttatagcggaaatacaaacattgtttatagagaaaacgataacaaacaaaatacttaaacacatgaagaaaactctgctgatgctcgttgttattttcatttcactatattcgcattcacaaagtccctttctgaattttagaattccagaagaatcaaataagcgtatcattggatattcttcaagtaataaaataaatgtttttttgaatataaaatatcaatcttgtaatactctaatacagtattacaaacaggattctaataaattgattgtgtaacaaaaataacgatatgatgaaaaagtttttttatttgagtgcgatactagccatagttttggtttcatgtaattcagaaaaggagtatatagcaaaactctctaataccgcttctatgattgagaaagaagctgatttaagtgaagcaatagctcttcattattgtgatacttggagaaaagtaatttacgatcatgaatacaatggagaatattgcactgatttcaatgaagccttagcgaagcatcaagagtttattatcacaacagatacctataagagactaaaacaaaagaaagattcaatcgaggctataatgccacaactaaatgattatccttcaagttgtaaagatgcttataatgagttagtatcaatatatgcagatgcagatgaattattcagattcgcagatgagcctaggggttctttatctacatactcaacaaaaacgacagacctttatcaaaagatagaaaagtcactgaaagaatttaaaataaagcatatacaaaacaaataatttaaaagagtagtatagttattgtagcagcttattgaatttaagactatcaaaagacaaaataataatttcacttcaagagcaacttcagaaagtactgctagaaaatagtgttcaaaagctagaaattactcttttgaattatgagttagaaaggaatagaacgaagatctcaaaatagcgtttttgaactagctttgaaatagtgacggtatatgacagcgataccgtcactatcgcaagcatataccgtcactatctttaccggatagcgtcacccttttacatgttcaaataataatcccgggttagcgtcatatattcctcactatattgatgacgagccagttctgtcaatagttcttctacaatgcactcttgattggaaaaagaaaaagtaatcaaaacacgtttcggaataccgccgggtttagtgattacattcagttgacggactgcatataatttctttatagaagctatcttttttacccgttcagctacatctgccggaatcaccactgtaaaaaatccgttttctgtcaataatccgcttactccttccaacaaatcgtcataagtcaatgaatcattgtgtcgggcagcagccctctgccgatccggacactccagcgaatcgataaaataaggaggattagaaacaattacgtcgaatttatccgaagacctgtatttcctaaaatcagcctgcaccacctctacccgctccttccagggcgaacgaataacattttccctggcttgcccgacagccgcttcatctatttccaacgctacaatatttgcatccggcaaactgcgttgcgccaacattaaagctaccaaccctgttcccgtcccaatatccaaaatccggtgcgcactttcaacggaagtccaagctcccagaagcaccccatccgtaccgactttcatggcacatttatcatgccataccgtaaattgcttaaattgaaaataaggattcgacattttatccgtttatcttaaagccgttttatactattattttattgcaaatcgccaaaaataaataataattatggaatactccctttacaagccgatattttggcattgtttttgtgtttttattctgcgcagtgctttattattagagagaatcaattaactttgcaaacgatttatgcatatcaatatgacataaactaaattaaaacgaaaaaatgaaagaaagatatttattggaagatggaggcgataacaacttctcgctaatcacagactatgatgggaacgatgaacaagcatttgatgtaaatgtgaaatctggtgaaattcttccggtactccccttacgtaatatggtattgtttcctggagtattcctgccgatcacggtaggccgtaagtcttctctgaaactcgtacgagatgctgacaagaaacataaagatattgcagtagtatgccagagatcggcacatacagaagatccgaaactggaagatttacacaatatcggtaccgtaggacgaattgtgcggatattggaaatgccggatcagacaacaacagtcattcttcagggaatgaaacgtttaagtctgactagcatcatcgaaactcatccgtacctgaaaggtgaaatagaacttttggaggaagatgtccccggcaaagatgataaagagtttcaagccctggtggaaacttgcaaggacttgacaatgagatacatcaaatcatcagatgtgatgcatcaggattcgtcgtttgctattaaaaatatcaacaactcaatgttcctggtcaatttcatctgctcaaacctgccgttcaagaaagatgagaagatggacttgttgagcatcaactcattgcgtgaacgcacttatcacttactggaaattctgaaccgcgaagtgcaactggcagaaatcaaggcatccatccaaatgcgtgcccgcgaagatatcgaccagcagcaacgcgaatacttcctgcaacagcagatcaaaaccatccaggatgaactgggtggtggcggtcaggagcaggaaatagaggaaatgcgccagaaggcagaaagaatgcgctggaatttagaagtcagagacacgttcatgaaagaacttgccaaactggaacgcactcatccgcaatctccggattacagcgtacagctcaactatctgcaaacgatgctcaatctcccatggggtacttatacaactgacaatctgaaccttaaaaacgcagaaaagacgttgaacaaagaccattacggactggagaaagtaaaagagcgtattttggaacacttagccgtattaaagctgaaaggtgatatgaaatcaccgattatctgcttgtatggccctccgggagtaggtaaaacatctcttggaaaatccatcgcatctgcgctcaaacggaaatatgtacgtatgtctttaggtggtgtgcatgacgaagcagagattcgcggtcaccgtaagacttatatcggtgctatgcccggacgaattatcaagagcttgataaaagccggtgcgtccaatcctgtcttcatcctggatgaaatagacaaagtcagcgccgaccgtcagggagacccttcttctgcattgctggaagtgctcgacccggaacagaacacatctttccatgataacttcctggatgtagactatgatctctccaaggtattgtttattgcaacagccaataacctgaatacaatccccggtccattgctcgaccgtatggaattgattgaagtaagcggatacatcacagaagaaaaagtagagattgcccgcaagcatctgctgcccaaagagctggaagccaacggactcaaaaagacagatattaaacttcccaaagatacactggaagccataatcgagtcatatacccgtgaaagcggtgttcgtgagctggaaaagaagatcggtaagattcttcgcaaatcggcccgccaatatgctacggacggttattttgccaaggcggaaatcaaaccgacagatttgtatgatttccttggagcaccggaatatacacgcgacaagtatcagggaaatgattacgcaggtgtagtcaccggattggcatggacagctgtcgggggcgaaatcttatttgtagaaaccagtttgagccgtggcaagggcggacgtctcacactgacaggtaacctgggagatgtgatgaaagaatctgccatgctggcacttgaatatatcaaggcgcacgcttctgttcttagtctggatgaagagatttttgacaactggaatatccatatccacgttcctgaaggggctattccgaaagatggtccgtcagcaggtatcacgatggccacttcactggcttctgccctgactcaaagaaaagtgaaagccaacattgccatgacgggagaaatcactcttcgcggcaaagtgcttcctgtgggtggcatcaaggagaagatattggcagccaaacgtgccggaatcaaggaaatcatcatgagtgccgagaacaaaaagaacatagatgaaattcaatatatttatttgaaaggactgactttccactatgtaaacgatataaaagaggtattcgctattgcattgactaacgagaaagtagcggatcctattgatttatctgttaagaaacccagccaggaatgacatttgagttacaatatacagacactaaaagtaatgcccgtgccggtctgataacaacagaccacgggcagatacaaacacctatcttcatgccggtgggcacactgggcactgtgaagggagtacatctgaccgaattgaaagaagatatccaggcacagattattctgggtaatacctatcacctctatttgcgtccgggactggatgtgatcgagaaagcaggcgggctgcaccgtttcaacggtttcgaccgccccatgctgactgacagcggtggttttcaggtattttcattagccggaatcagaaagctgcgtgaagaaggagccgaatttcgttcgcatatcgacggaagcaagcacatcttcactccggagaaggtgatggacatagaacgtaccatcggtgcggatattatgatggcttttgacgaatgtcctccgggcgactcggattacgagtatgccaaaaagtcattaggattaacccacagatggctcgaccgttgtatacaacgttttaacgagacagaacctaaatacggttataatcagtctctcttccccatcgtgcagggatgtgtttatcccgacctgcgcaagcaatctgcagagtttgtagcgtccaaaggtgctgacgggaatgccatcggtggtttggcggtaggcgaaccggtagacaagatgtacgaaatgatcgagattgtcaatgaaatactccccaaagacaaaccccgttaccttatgggtgtcggaactcctgtcaacattcttgaaggaatagaacgcggcgtggatatgttcgactgcgttatgcctacaagaaacggacgaaatggcatgttgttcaccaaagatggcattatcaatatgcggaacaagaaatgggaaacggacttctctcctatcgaagccgacggagcctcttgcgtggatacattatacagcaaggcttatttgcgccatcttttccatgcgcaagagctactggctatgcaaattgcctccatacataatctggcattctatctgtggctggcaggggaagcaagaaagcacattatcgctggagatttctcgacttggaagccgatgatggtcaaaagagtatcaactagattataagaaatgaaaagcaatcgatttataaaacggctggactggtatatcatcaagaagttcttggggacatacgtatttgctattgcactaatcatttctattgcagtggtatttgacttcaacgaaaagatggacaaactaatggagcatgaagctccatgggataaaataatctttgaatactacatgaactttatcccctatttctccaatctgttcagtccgttgttcgtattcattgctgttattttctttacctccaaactggcagaaaactccgaaattattgcgatgttctccaccggtatgagctttaagaggatgatgcgcccttatatgatttctgccgctatcatcgccctcgtcactttcacactaagttcgtatgtaattccgaaaggaagtgttacgcgtctgaattttgaagaccggtatatcaaaccaaagaaacaaaactcggtaagcaatgtgcagctggaagtggatagcggagtgattgcatatatcgacaactataacaacgcaatgaaaaccggtaaccgcttttcattggacaaatttgtggataaaaagctggtttcacatttaactgcacgacggattacctacgacaccaccaccgttcataaatggacgatccacgattatatggtacgcgaactggatggtttaaaggaaaagatcactaagggagaccggatagactctatcatcaacatggaaccttccgactttcttatcatgaaaaaccagcaggaaatgctgaccagtcccgaattaagcgattatatcgccaaacagaaacgaagagggtttgccaacatcaaggagtttgagattgaatatcacaaacgaatcgctatgtcgttcgcctctttcatccttaccatcatcggtgtatcgctttcgtcccgaaaaacgaaaggcggtatggggcttcatctgggtatcggattaggattaagtttctcttatatcctgttccagacgattacttccacctttgccgtgaacggaaatgtgccgcctgccgttgcagtctggattcctaatatcctttatgcgggtatcgcattcttcttgtatcagaaggcacctaaataaaaggtaggcaagccttccgcagtcttcacggcttctacccatagattgccctaaggttttggatgcaccggataaacgaagagtataaaagtagaagttccgcctattcttgctaatgcaagtgtaggcggaacttttttgttgtatccatttcctcttttgtctattctccattgttttcacctgacggtgatttggaaaatccctctttctccttacattcttaaaatcgttaaccgacttcttttacataagcagaaagatctgcagcagagatgtttttggctataattacaccatttccatccaataaatagttagtgaatccccggtttaaacggtacttcttaaataagccggaatcctcgccttctgtttccacgaaacaagtgggcgtaactatttgatccttacgaacggtttccttgaatattgactgatattcgtcaaatgaaatagaaaccatttccacattatgagaagaacgaagcgcattgctcaaacttacattttgcatccgggactgcgcgtcataacttgcccaaaaacttagcaacacatatttacctttcaaatttcccaatttaaaggcgggttgcccgtttaacgtagattcaattttaaaatcaggggctacgtcaccctcactcaaacctccggtaggtttgtctttctcaacgaaagcggtcaaggaacaaatcagtaatacaacaaaaatccattttacatgcttcatgtaattcggttttagttaatactatccgggactgtccttaaacagtggtttcttcccgaaacattgtcttttcaggcatcaggcgaagaggaatccgctgattatcagagcctttatttttgaaaccgggtgcaaaggtaagtaaatattaaattaacttccaagcaaataagcaaaaatctcacttttggggtataactttttatgttatttagcataaaaacgaacttttttctctacttttgcagcgttaaagtctattttttatgcaaccatcaaatactgaattgattctgattcgagttaccggcgaagatcgcccgggactgactgcttccgtgaccgaaatccttgccaaatatgatgccacgattcttgatatcggccaggcagatattcataatacattatcgctgggtatcctgttcaagagtgaagaaagacattccggattcattatgaaggaattgttgttcaaggcttcttccttgggagtaaccatccggtttgaacctatcaccaccgagcaatatgaaaactgggtaggtatgcaagggaaaaaccgttatatcctgacggttctgggacgcaagctttccgcccgacagatttctgccgctacaagcatattagccgaacagggcatgaatattgatgctatcaaacgtctgacaggtcgtatcccgttggatgaatgtcaggcagatacacgtaccagggcttgcatcgaattttcagtgagaggtactccgaaagatcgcattgcgatgcaggagaagctgatgaagttagccagcgaactggaaatggatttttctttccaacaggataatatgtaccgtcgtatgcgccgtctgatctgttttgatatggactctacattaatcgaaacagaggtgattgacgaactggctatccgtgccggtgtaggcgacgaagtaaaggccatcacagaaagcgccatgcgtggagaaatagactttacagagagctttacccgccgtgtagcactattgaaagggctggacgaatcggtcatgcaggaaatagccgagagcctgcctatcacggagggcgtagaacggctgatgtatgtattgaagaagtacggttacaaaatcgccatcctttcgggaggattcacttatttcggccaatacctgcaaaagaaatacggtatagattacgtctatgccaacgaactggaaatcatcgacggcaaactgaccggacgttacctgggagatgtagtagacggaaaacggaaagccgaactgctccgcctcattgcacaagtggaaaaggtggatattgcacagaccatcgccgtaggagacggagctaacgacctccctatgctaggggttgccggactgggaattgctttccacgcaaagcctaaagtggtggcaaatgccaagcaatcgatcaacaccatcgggctggatggagtgctctatttcctcggattcaaagattcttacttgaatatgtaattagaccaaaaaatagattatctttgctgacaaattaaataaaagaatgaagttttccgaactacaattaaatgcaaatgtgcttgaggcgcttgatgccatgcgatttgacgaatgtacgcctatacaggagcaggcaattccaatcatacttgagggtaaagatttgatcgcagtagcacagacaggaacaggtaaaacggccgcgtttctactgcctgtattgaataaattatctgaaggtaaacatccggaagatgcgattaattgtgtcatcatgtctcctacccgggaattggcccaacagatcgaccagcaaatggaagggttttcctatttcatgccggtatcgagtgttgccgtatacggtggaaatgatggaatattgttcgaacaacagaaaaaaggactcactttaggagctgatgttgttattgctactcccggacgtctgatcgcccatttaagccttggatatgtagatctttccaaggtttcttattttattctggatgaagcggaccggatgctcgacatgggattctatgaagatatcatgcaaattgcgaaatatctgccgaaggaacgacagacaatcatgttttctgcaacaatgcctgcaaagattcagcaattggcaaacacaatcttaaataatccgtcagagataaagctcgcagtttccaaacctgcagaaaagattattcaggcagcatacgtttgctacgaaaatcaaaagctgggaatcatacgcagtctttttatggatgaagttccggaacgtgtgattgtctttgcatcttctaaaatcaaggtcaaggaagtagccaaggctttgaaatccatgaaactgaacgtaggggaaatgcattcggatctggaacaggctcaacgggaaactgttatgcatgagtttaaagccggacgaatcaatatattggtagctacggacatcgttgcacgtggtatagatatcgatgatatccgcctggttatcaacttcgacgtgcctcacgacagcgaagactatgtacaccgtatcggacgtacagcacgtgccaacaatgatggtgtagcacttacgttcatcagcgagaaagaacaaagtaacttcaaaagtattgagaacttcctggaaaaagagatttataaaattcctattcccgaagaattgggagaagctccggaatacaagccacgttcttttagcaagggcaagggtggcaactacaaaagaaaagatttccggggaaaaaggaataataataacggaggaaagagaaataaccgtccgtctccccccagacaaaattaaagcaaggcttttttaatccggcactatacgatctgaatgtatggtgcttttttatttggatgaagtgatagtcaaatctcctttaaaacttacttccatatttacaatgctatatatggaagtttccggaatggccaggacagcttgataatgaaaaccgttccggtctactttcataaactttgtatctgacaggatggattgctccagaaaatcgacaggaagtactttgtcaaacatctgtttggtaacatcgctggcaaacaggctctttttaccttcatacacacaaatgtgcatcacattatcatagtatacattatccatgctaatcccgtcttcggaataagtcgtcttgatgactctcattttagaaggattaatatatacgtatgcgcgataacgagtgccattatagctcactacactatcgcgtttggttacttccgtatatgccggaattactaattcctgacggacaaaatagattgaatcattggcatcttcggatttatgcaacttaatcacatcatccgttatggaatgaaaccagaatatatgttctgcctgcttatcaatcttgtaataagtagtatcatttccataagtataaagagtatcccgtattattttaaatgcaatgggagtactttgtacatctgcatagtagatagtatctccttctacacgcatcaacgggctctccgtttcatcgtccagccaaattccctgcagtagcccttttgcactaagatcctctttctcttgttgaagagaatggggactcttattgccgctacatgccgcgaaaaagattgccattaacgatacagccacatttttcatcatctattttagtttttatataaagatactcttatttttttatttaccaatacagtgataaataaatccgagttcttccatctcttttttatcatatatattacgtccgtccaacacaatctgccgggacatcgttttcttgataacggcccatgaaggcagacggaattctttccattcggtaaccaacatcaacacatcagcatccagtacggcatcatacatatcgcaagcataatagatagtatcaccaatcctgcgcttacattcttgcacggcagccggatcgtatgcgcgtactttacaacctgctttcagcaatttatcgatcaggactaatgccggagcctcacgcatatcatccgtttccggtttaaatgccaatccccacaaagcaacagtcttaccctgcaaatcaccattaaactgtttcattaacttttcgaacaagacacttttttggttctcattcacttcttccacagccgtaagtacccgcatggtataaccattctgttctgctgttttaatcaatgccttcacatctttggggaagcaggaaccaccatatccgatacccgggtacagaaacttacgtccgatacgagtatccgaaccgatcccactacgcaccatattcacatccgcaccaacaatctcgcacaagtttgcaatatcattcataaagcttatacgggttgccagcatcgaatttgccgcatatttagtcatttccgcagacggaatatccatgaaaatcacacggaaattattcaataagaatggtttatatagtttggacatcaatttctccgcacgtgccgactccactcccactaccacgcggtccgggctcataaagtcactgatagcatttccttctttaaggaattccggattagaagccacatcaaaatcaaccgtcacgcctctcttatccagttcttcctgaataaccgcacgaaccttactggcagtgcctaccggaacggtacttttggtaactaccaatttatactgtttcatattgcgaccaatggtacgggccacctccaatacgtatttcaaatcagcgctgccatcttcatccggaggagttccaactgcactgaatataacttccacttcatccagacaactttccaatgaggtagtaaacttcaatcgctttgctttcatattacggagtaccatctcttccaatccattttcataaattggaatgttccccttttgcaaagattcgattttctctttgttcgtgtctacgcacgttacattcacgccaatttcggcaaaacatgtgcctgacaccagacccacataccctgttcccacgattgcaattttcatacttaatctattgtttgtttagaaattcattcaaaataaacggcgtccttgaaagcagttccctctctgtctttcgcagataataacatttgcgactctgccaacggccagtcgatccccaatgcttcgtcattatataaaatagaggcttctgcctgcggagcatacttgttatctaccttatatgtaaaaacagcttcttcactcaagacagcaaagccatgagcaaaaccacggggaataaaaaattgtctcttgttttcttcactaagcaatacacaaacatgctttccaaacgtaggcgatgatttacgcaaatcaacggcaacgtcgagcacttctcctttaagaacacgaaccagtttcgcctgactatgttctcctttttgatagtgcaatccacgcaatacaccaaaagatgatttcgactcgttgtcctgtataaagtttacgggaccaatattggcttcaaactcttctttcttataggcttccataaaatagccccgttcatcggagaaaactctaggctcgatcagccatactccgtctatttctgtctgtatatagttcattattgatagtgataaataaaacgatgcaaaagtagtgaatttttcgaagttttctgggatatattcaatttatctcttaattttgcagacatgattgaattggcacaacatatagagactttactactggaaaacgactgcgtcattgttccgggatttggtggttttgtagcacattattcgcccgcaacccgcgtaaaggaagaaaatatatttttacctcctacccgtacaatcggttttaatcctcaattaaaactgaatgacggcgtactggtgcaatcttatatgtcagcatacgacacaagttttgctgacgccagccgtatagtagaaaaagaagtaaacgaatttatcggtctccttcatgaggaagggaaagcccatctggataatataggcgagattcaatctaacatttatggtaactacgagttcgttccttatgattataagataacaactccttcattgtatggtctcgactcttttgaaatacatgaactttcggctctgcagcagaaagaaaaagtattggtaccgacttatcaggaaaaggaaaagaagacttttgaaattagtatcaaccgcgcgtatctccgcaatgctgcagcaatgattgctgccatcgtactgttctttgccttttcaactccggtagagaataccgacgttcaaaagaacaattatgcacagttattgcccagcgagctttttgagcaaatagaaaagcaatcagttgcagtaactcctgtttatgttaagaacgatgctgcgcaacaagcaaagaagctttctgcttcttccgcttcaaccaaaacttcatctgctaaaaagcatacaacggataaagccaagacttccaaaccgatcgcagtaagagaagtgaaagtggtaaaacaggaaacagcggctcctgctcctgcggtgaaatctcaagaaagtgcaaatcatccttttcatatcattgtggcaggaggaatcagcctgaaagatgcagaagctattgcaacccaattaaaatcaaaaggatttgctgatgcaaaagctctgaacactgatggcaaagtacgtgtcagtatcgattcattcaacaaccgtgatgaagcgaccaagcaattacttgagctaagaaaaaacgaaacttataagaatgcctggttactagctaaataaaaaccccttttaaaaagcatgaaacgagttctttgtcctaaatgtgagaattatctttattttgatgaaaccaagtatagcgaaggccaatcactggtatttgaatgcgaacattgtggcaagcaattcagtatccggttaggaaaaagtaaagttaaggctcttagaaaggaagaaaacctggaagaagaagctgaatctcataaagaagaattcggatatatcactgttatcgaaaatgtatttggttttaaacagttacttcccttgcaggaaggtgacaatgtcataggccgccgttgtgtaggaacaaacattaatactcccattgaaagtggtgatatgagcatggatcgacgccattgcatcatcaatataaagcgtaataagcaaggaaagctagtctacacattacgagatgctcctagtctcacaggtactttccttatgaatgaaattctgggagataaagaccgtgtacgtattgaagatggcgctattgtgacaattggagctactacatttattttgcatacggctgaacaagaataataaataacttgataataaaaaatagcgccacttgttcagaggacagtggcgctatttttttatttagtcttctaattacagaatacctttaacggtctcaagcattcctttttcctggatagaatccaaatcagcttttacggcttctgtcaatcccggaatcttattcaaatcttctccccagataaaatctgcagccagaacaccttcggcaactttctttgtgcaacctgttgcccaaagttctttcagcaggttcatgatttcaggagcatcattcggaacaatttcagcaccatcagcacgtacaccacctttataataagtaatgatagcggctaaaccaagtaccagtcctttaggaagttcacctttacgttccagataagtcttcaatcccggcaaatcacgagtttcgtatttagggaaagaattcagcatgatgctggttactgcatgatccacgaacggattgttgaagcgttccaatacatcatttgcaaatttctccaactcatccttcggcaagttcaaagtttccatcagttcgtcaaacattaccttgtggatatatttgccaatcacttcgtgctggcaagcatcacgtacaatattcactcccgagagataggcaaccggagaaagaacagtatgcgggccattcaacaaagtaaccttacgttcgtgataaggagcttctgacggtacaaacaatacattcaagcctgccttgtcagccgggaactcttttgcaacttcctgcggagcttcaataacccacaaatggaaaacttcagcctgaacaaccagattatcatcatattgcagtttttctttgatagcagcaatatccttgcgcgggaatcccggaacaatacggtctaccaatgttgcatatacaccacaagcttcttcaaaccaagttttaaactcattccccaggttccacaattcaatatattgataaattgtttctttcaacttatgaccattcaggaaaataagctcacaagggaaaataatcaaaccttttgtcttatcaccattgaatgttttaaaacgatgatagagtaattgagtcagcttacccggataagatgaagcaggagcatcctcaagtttacaagccggatcaaaagcaataccagcctctgtagtgtttgaaataacaaaacgcatttcaggttgctctgccaacttcataaactcgtcattttgagtatatgggtttaaagcgcggctgattacatcaatcattgtcaagctgttaacagcctctcctttatccaatccttgaaggtttacatgataaagatcatcctgtgcattcagcatatcgaccatacctttatcaatcggttgaaccactactacactgctgttgaaatcagctttctggttcatgttataaataatccaatctacaaatgcacgcaaaaagttaccttcgccaaattggataatacgctccggacgttgtgttttaggagcagtttctttgtttaatgctttcatgttagttgtaatttataaagttgatattatacaaattcaaaataaaaatcaatgttttcctttatcaggatatcaataggcatgtattttacaggttcaacagacttcttaaacacgacatgatcgcacaaagccttcaccccacaatatccttgcaaacccggacgttgcccgattaaataatgcacatcaccggattttaataaatctacgtttgctttcagaaggtcatatcctatcagtcctttcatgctacgtcccgcatgacgaagatactctcccaactgatacactctggaattaaatacaactcccagtaaagccttcggatgcgcctgaaaaaactcatccaatgtctgttggttactttcctgatcggatttattaagtactacctcatggattaccaagttattatattcttcggcaatgtaactcataaaaccatccaaacggcgttgcatctgtatttcagccggattatctttattgttacttaaaaacaaaaccaactcctggccttctcctgccgaataattgcgcatcaatattttcgctgcgatatatccgctcttatatgaatcctgcccgatatacgtcaacgctttcgcttcttccatattgaaatcgacaaaagcataagcaatcttattttcctgtaaataggctgtcagcgccagtgtctcttcccgaaaattcggagaaatcaataccgcatccacattcttttcttttatagaaaggcaggcttcctgataactcttctcatccccatggtgatagcacaaataatctatactcacattaaaaggacgtaattcttgccggacacgctcaatcccccctactaccgaatgccaataatcatgctctatataataaggtatcaaacagaggaaagaatatttctttttagcagccaaaccgatagcaaacacattgggctgataatgaatctcatccaacaccttttgtactttggctttgcttttgggagacacgtcaccgcgattgtgcaacaccctgtcaaccgttccggcggaaacaccggccatacgggcaatgtctttaatggtatagttctggtcctccatagtgctaaaacttaaatattataaataatcgctgcaaatatacgaattattttgttactccaagtaaattttctatttttgtgttcgataacggttaataaaactaaaacaagatttacgcctattagctttaaaatcaatactatataggtataaatatagaaagtaataattttatatacttaaaacacagtaataatgaagaacttcatggacgaaaacttcttgctgcaaacagaaactgcgcaaaagttgtatcacgagcatgcggctaaaatgccgatcatcgactatcactgtcaccttatccctcaaatggtagctgacgactacaagtttaaatcactgactgaaatctggttgggcggtgaccactacaaatggcgtgcaatgcgtacaaacggtgtagacgaacgtttctgtacgggaaaagataccacagactgggaaaaatttgaaaaatgggcggaaacagtaccttacactttccgcaacccattgtaccactggactcaccttgaactgaaaacggcatttggtatcaataaaatattgaatccacaaaccgcacgtgaaatttacgatgaatgtaacgagaaactgtctcaacccgaatattcagctcgtggaatgatgcgtcgttatcatgtagaagccgtttgcacaacggatgatcctatcgattcattggaatatcatatcaaaacacgcgaaagcggatttgaaatcaagatgttaccaacatggcgtcctgataaggctatggctgtagaagtccctgcagatttccgcagttatgtagaaaaactggcagaggtaagtggtgttatcatctccaactttgatgatatgatcgctgctttacgcaaacgtcatgacttcttcgcagaacaaggctgccgtctgtctgaccatggtattgaagaattctacgcagaagattatacagatgctgaaatcaaagccatctttaataaggtatatggtggcgcagaattgaccaaggaagaaattctgaaattcaaatcggcaatgcttgtgatcttcggtgaaatggactgggaaaaaggatggactcaacaattccattacggcgctattcgtaacaataacacgaagatgtttaaattactgggtgctgatacaggtttcgattctatcggtgaatttacaaccgccaaagcaatggctaaattccttgatcgcctgaacactaatggcaaattgactaaaacaatcctctacaacttgaacccatgcgccaacgaagtaattgcaacaatgctgggtaacttccaggatggttctatcccgggaaaaatccaatttggttccggatggtggttcctcgatcaaaaggatggtatggaaaaacaaatgaatgctttgtcagtactcggtcttttgagccgcttcgtaggtatgttgaccgactctcgttcattcctatcctacccgcgtcatgaatatttccgccgtacattgtgtaacctggtaggacgtgacgtagaaaacggagaaattccggtatctgaaatggagcgtgtaaaccaaatgattgaagatatcagctacaacaatgccaagaacttcttcaagttctaatagatagtagttacactataaaaaaaccgctaccaaagtcgaatatagctttgagtagcggtattttttattcctacagctgaacagtaacaccccaaaaagctcttaacaaaaaaggagaaccttttaagttctccttttaataatctttgtacaccctcagggactcgaaccctggacccattgattaagagtcaattgctctaccagctgagctaagagtgcaacattttatttttattgcaacgtcgaatttgtacaccctcagggattcgaaccctggacccactgattaagagtcagttgctctaccaactgagctaagagtgcttaattcctcgtttgcggttgcaaaagtaggtcttttattttatttgaccaaacaatcatgcagcttttttactatcttttttcgtctttattcgaacacataaagctcggaaggcgtatttcgctttaaagcaagtagttgcacatctttgcctacaataacacctttgttctttaatttccattccaccgttttataagccagctccgggtgattattgtctttacttaaatggcataaccagatatatcgcaaatgttcagtaatattttccgccagaaactctgcagtatcagagttactcatgtgtccggttttacttgcaatccgttctttcagatattgaggataaggccccattttgagcatttcctcatcgtagttggcttcaagtatcagataatgggctttactgatataatgagcagctgtaggagtaatctctccaaggtcggttaagaaagaaaagactttgccatcaatttcaatgcaataccccacattgtccgttccatcgtgtggcacttcaaaagattcgatgtgaaaatcttccagcgtcataggctcttgcttttccagataacgaactgacgagctaagtttctccgtcatacaatagctacgattaattccagcatgaatacgtgcggttgtataaacaggaatattcattttttctcccagattacccactgctttaatatggtcagcatgatcgtgcgttataaataccgcacgaatactatccatcaagatattataatctttcagtgattttttgatagtacgtatgccgattccggcatctatcagtatcccataggtttcagtgcccagataataacagttcccgctactgccactcgccaggcttataaattttactttcatgttttatcctctttattaaaatgcaaaatgccgtcaacttttacagcaaagtgacggcaaatatacataaaaaagcagagaattaccgagaagcctccttctttttgtcgatggattcggtgatttttgcaaataatagtagcgctacagcggcaatcaggcctatagcagcaaagtaataccatatataatgggcatttccactagctgcctcccatgcttcccgcgtctcgaacaaagccggatccggacaatatttagtgagcaaaattcccgccagaccaaaaccgaaaatagaagaaaggaatgaatgtaaatgactgaatcctaaatacattccttcttctcctttcggagcctgtaaagagaaatattccagataacgcggtgaaatgaaacattcggcaagcgcctgcacaactatacctgcaatcatcatcagagtaatattactcatgcctgtaataagatcattacccagcagatttccacatgccatcagtaatgccgaaataggaatcaaaaacattcccacattcatcgaagtaatcgcactgcgtttggccatcaaacgagtgataaaactaacgcagcaaaccaccacaaacggattcacgttggcaatccaacccggttttgccgtctcgccagccatacgaatcacatatttaggcatagtggcataaagctgctgttgcaccatccagaaaccagtaacaatcaaaataagaatcaataaacgccagtttgtgatgattcgcataaatccctgtccaatctcatggagactttttccttcacctgccgtatgcgtcgatttataaagaagaataacagcaagtaaagcaactattgtcatcgcaccggagaaataattaatatagatatacgcttgttcaccaatgacattacgcaaaggatcgataatcgttttaccggtgaaagcacccacatttaccatcatataaaatatggaataaccacgggcacgggttgcttccgttgtttctttagccacagaagcggagataatggacttaatgaaagaacctcccaccataagcacaaacaaaaccggcacgatgatccaccgggtatagctatcaggcaaaccattaaattgagtagtggcaccataactaaccaaaccggcagcttccagtaaagtgggcagtacacccaaccctaaatatccgatggataataaggaaaatgctataatcattgatttccggaaaccgatcttgtcagcataagcaccggaaaaaataggaagcagatacaatccaccggaaaaaagcccggaaatcatacttgcttcgaaatcattaaaacctaaaatggaagatagataaatagtgagaacgataaaaacggcataatatgccatacgctcaaacagttcgactgtgttgctgacccaaaatgctctcgtaaagcctttagcagcacgctgaggggaattgttcatgtatttatatttttattaaaatgttaatttgagacaaagatacgtttttttggcttactgtccgtatctttgttccaaattaggtaattaaaaactatgattatagctgttgattttgacggaacgattgtagaacatcgttatccacgcattggtgaagagattccattcgctgttgacacattgaagttattgcaacaagaaaagcatcgtttaatactgtggagtgtgcgtgaaggagcacttctggacgaagctgtcgaatggtgtaaagccagaggtttagaattttatgccgttaataaggattatcctgaagagcagaaaggccatcagggattctctcgaaagttgaaagccgacatgttcattgacgatcgaaatctgggtggtttaccagactggggagtcatttacgaaatgattaaagagaaaaagacgtttgcagatatctatagccaaaacggagaagaagaaaaaacatccctgaaaaagaagaaaagatggctgcctttttaggaagctgataaatatcaaactaataaaatagaaatgcactcttatctgacatgattagagtgcatttctatattcataaatgatttatcattcaacattgaatcacaatttactacgcttctttattttcccacttttccctaaactcccataattgctcaatagtaggatgaaaagtcggattctcccagtttctggaaatcattgcaatcaaagattccaaatacgatttaccatcaataatggtagtacatttattgacctgatatctttctgttggataattctttgtctcaatcatcttttttgcccagttcaataattcctgaacagcttcattgtcataagtatgttgtgccatatctttagaattttccgcaaagatacaaagtttatttattcataaataaagttgttcgtttctttttactataaagattccattttaaatttatacctttacgtccaatatactcaattagactaactaatagaaacaataattatgaagaaaattttcattttagtatgttcatgtgctcttttggcagcatgcaacaatagcgcgaaaacaaacaagagtgccggtgcagacagtacttcaatcgaagtaaccgatatccataatgcggaaaattcacttgattacgaaggaacttataaaggagttttccccgctgccgattgtccgggtattgaaacaaccctgacattaaatccggacaaaacattcagcctccattccgtatatatcgatagagacagctcatttgacgaaaaaggtacatatactttaaaagacaacctattgactcttaatgaagaaggcggagaactttcttattataaagtagaagaaaatcatttacgcaaactaacaatggataaacaagaaataaccggagaacttgcagaccattatgttttaaataaggaataaggtccaaacaaattttgctatcaatagagaacaaattcaatattttttatgtttatataaatagatattaacttaaaaatagaacaacttatgatttatagttttttatttcccacaaaatcgaatacaacgaaagtatctttgttgctattggctgtccggatcatcttcggtatattattaatgaaccacggtatccagaaatggagtaacttccaggagatgtcagcagtatttcctgatccgcttggaataggaagccccctatctctcggattagctatttttggcgaacttgtatgttcgatggcatttatcatcggattcctgtatcgcttggcaatgatcccgatgattttcacaatgatagtagccttctttgttgttcatgctaatgacgtatttgcggttaaagagctagctttcatctatttagttgtatttatattgatgtatattgccggtcccggtaaattttcaatagaccatatcataggaaacgaattgtcacggcggaagtcaagagcatacaaaaattagaaataacagccccgattaattaaaaaatattatatttgcatacacataagagagaaattatcaatattttttattaatcaaaaacattttaacatgaaaagaggaaaactgactttagtcgcagtagtacttagtggtagcttattattcagttcttgtgtaggatcatttggtttattcaaccgcctgtcttcctggaatcaatcagttggaaacaagtttgtaaacgaactcgtattccttgctttcaacattgttccagtttatggtgtagcttacctggctgatgctttagttatcaactcaatcgaattctggagtggctccaatccgatggctaatgtaggtgacgtaaagaaagtaaaaggagaaaacggcaactacatggtgaaaactcttgagaatggatattccattactaaagagggcgaaactgcttcaatggacctgatctacaacaaagaagccaacacatggaatgtcgttgcaaacggtgaaagcgctgaattagtaaaaatgaacaatgatggcactgctgatttgttcttgccaaatggcgaaaagatgaatgtaacgctggatgctcaaggcatgctggcagcacgccaggctacaatgagcaattttatgtttgccgcccgctaaaaataaaaacaaatacgaaggagatgaaacatcatataggagtttcatctcctttttcaatcttatcttcttctatcaagaatcttttgtactatgaataaactacatacacttatctattctgttctaatcttcacctgtctatcttgtcagcaacagactcctcaaactcaaatagaacagacagccatagatttttgtgaagccttttataatttcaattatccggtcgccaaagaatggagcacgccttcttctcaatcttatcttagtttcttagcatctaatgtcgggcaaccccatctggagcaacttaagacacgaggcgctgcaaaagtttctgttatttcaagtgagatagatgctaatttagaagaagcgtcggttgtctgccaaatcaaaaatgcattcgtcattcatcccatcggaggaaaaatggaatacgtaagttccctgcaagatacgctcgaattagtaagagtaaataataaatggctgattagaaaggatatcccacagcaaaatggaaagcaaagtcacgactgaatttaggatgaatgatggggaaatgctctttcctcgtttcataggcaggattgacagctttcatacctccgtcaaaacgcaaaataaagaaatccaaatccaggcggagacctaatccgtaggccactgctatttgcttataaaacctatcaaacttgaaaacccctcccggttgattggcataactccggatggtccagatattaccagcatcaataaataccgccccctgaaacttccagaataacttgcttcggtattcaatactggcatccagtttaatatctccggattgatcgagcaaattcccatttcctgcaaaagagcccggtcccaaatcgcgaacactccatccgcggacactattggctccaccagagaaatattgtttctcaaacggaatagtcttcgcatttccataaggtacagctattcccacaccagcatgaaacgcaaaagagttacgataatcgattctgatattcttagcaaaatcaaactcccctttcagatattgagcataaggaattcccagaatagcgtattcaccattactgttcttccgaatgtttgcagcctttgacagagcatacattacatttcccgccgattcgaaattaaaacggatggagtatgaattagaagcaatcgtattattgataatcgatcctcccacgctattataattatagctatatcccatatttataatcagtcgatcctgataattatactggaatatatggttctgtcctttatttatatagtcttctttaaacctttcagagatacggggcaaataaaggaaagcaatatttatcaaatcaatacggtgttgtatcttctggcgttgtgtccacttgtaactccagttagcagaagccatcgtacgcaagaactccggtcgcaactgataattatactgtaaaccaaactctgttgtcgccctgattttccgtttaaaatcagaggaaatgaaagggaacagaaaattagggaagttgatactcgtttccactccatactccgtatagttattatttgaatagcctgcctgaagcccggaaataacctcatacgctccacggaattttatcataaacgtttccgacccgcgaaagagattcctattctggaaagaaacggaagctgccgctcccaagtcaccggcagaattggttccctctacctcaaaggataccgatttatgcttgctcttagtcaacatcacgtaacaatcgagcattgttgaatctccaacttgagtctcgataaaacggatattcgtatatttcaatgcagacaaacgcccgaaactggaataagtttgctgcacatcacgctcattaaacaaatcgccggaagcaaaccggaggttatccgtaagcactttaggacgtaaatagagcttatccttatagtaaatcggatatcccttataatgaaccgaatcattaatatccacactgctcaaggcagaagactgcaaaacgtcataatccgtaataaaattaatcttattgatccaatattgctgatgtgcccttgccgaatcactcgcatgcgctttatacatctgcaaatgttgagtcagatctacattataagtattacgaaccgtatcggccgtatatccgatataatccttattaaatttataatagccattccgaagcaacttattcgtgatacgttgtctgtccgcatccaatacattcacatccaaatacattccttccttcaacaagcttctggcagaatcctgtttgagaagagaggctattttaggatcataaatatcatatttgatagattgaacaacgtagggtttgccggccgttacatcataatacagcttaatctttttcttttttattttagtcgaacgcttcacggttgccgccatatatcccatattgtgcacagccttagtgatctcttcttcagagcgtttcgcttcgtcctcgctatatattacaggagcatcccctatccttcttaaaaatttgtttccccatttggttgaatcacgccccgacagattgtagacataaagttgagtctttatcaggctgaaccacttggcattaggattttgacgaacatacatgcgtaaggaagaaggccgtatgtttttctggtccgtacgaattttaacttcatccagcaaataagaaccatccggcacaaacttagtggtagtacacgaagcaagtgacaagacagcagcagaagcaagcaaacaaagaaaatttctcctcatacggttttacatcgatagcatgaaaaatgcgcctacaaagataaattatattttccgacggggaaaataatttaagaaaaagacgaagaaagtaaggatagattggaaatatctttatagctttgcaaaagaatatcaaatctatggcatcattaagtaaaaacaaaataaagtatatccactcgctggaactgaagaaaatacgtaaagaagagcgggtatttctggctgaaggtcctaaattggtaggtgatttactcggacattttccctgtcgttttttagcagccactccctcctggtttcaggagcatccgggtattgacgcaagtgaactggtagaagtttcacaggaagatctttcacgggccagtttattgaaaactccccaacaggtacttgctattttcgaacaaccacaatatactttggatccggaggcagttcgttcatcactttgccttgcattggacgacgtgcaggatcccggaaatctgggtaccattatccgtttggccgactggtttggcatcgaacatattatctgctcgcagaatacggtagatgtatataaccctaagaccatacaagccactatgggtggaattgcacgggtgaaagtacattatacttccctccccgattttatccggtcgctcggagatactcctgtgttcggtacattcctggatggaaaaaacatgtatgaacaaccattgtcgaccaatggcttgatcgtaatgggaaatgaagggaatggcatagggaaagaggtagccacattaatcaaccgaaaattatatatccccaattacccggcaggccaagagacatccgagtctctgaatgtagccattgctaccgcagtaatctgtgccgagttccgtcgacaggctgcatggaagtaaaatcaaaaggataaaacaaataaggaaataaagcttcccccttcttttctgcttcctgcagatactcattaaaacattgggaagattgattcgaaacactgggaagattaatttgaaacactgggatgttttttaaaatcatcccagtgttttttatttcttccatctgactttcagaaagcagcactatcactcccggcatccattcaaccgattcaatctcttcggtcaatgggaacacacctcggacaactccttcgtcagtgatctccactacctgctgcttcatatatccaacggcaggtatcagcaaataatgagaagcaaagcgtttcattacaatcagttgtttgaacgtctttgttgttgctgcctgcgttgattcatctggcgttcttttctttgctctatccgttccttttggatatgctgttccacctgaatctgctccggcttcttctcacgatgagttcccgtacgacgacggttcatctcttccggtgttagacgctgaatgtcatctttattcttgtctatgaccttatgtaaagagtcggcattttctttagtagctatcttcttcaaagaatccgctttcaatgcttctatcttattcaaagaatcgcgtacggcaaatgcgagcgtatccgtacaatgataacgagtcatcatgaagcggtcggccaatactgccccgcctttttcctggctatccatcggataataaatgaacccttttatttctttcatcgaacctaatgtgtctgcaaacaaacgaatttgttgcacacccggttcagtcaccgttttccaatgattgatcgtatctttttcataaatcacctgcatagccatagtaacacctcttaaagagtcggcaagcatcggctccaggaaacgataccgcacttcccataccagtgtatcccggtctttgtagttagagtcggtcggcaaagtaaatacatattgattatccatcatttcaccggtcaaacgtaccatacgctgccacggccagacatcgatgctatcaccctgcttagtcattttcggtttcttatcacgcttggctatcaggtcgccaacaagttcctgttcgtctttcaaacgttttttcaccttatcataaattttcgataaaatctctgtgttacgggtataccaaaccatggatgagtcaaatgcagcttgtgtagtcccgtatttcttgaaaacggcgtcgatatacaatgctttcttatagttctcactataaggcaaattatctcccatagactttgccacatgataatcatacagcaaattctccatcttcgattccgagattacatcactgggtcttttcactttacacccggctaccgcaaacacgaacatgcagatgagacacagatgaaaccgaaatttatttttcatgatccgtagcttcctttttatctttatccagcgaatgataagactcattcaaatatttactataaaagagtaacaaggcaatgataccgcaactgatagcggcatccgcaaaattaaagatcggactaaagaatataaaatgctctccacccacaaacggcatccatgtaggccagtttgtatctataatcggaaagtaaaacatatccaccacttttccgtaaaaccaagtagaatatccaccaccttcgggcatgaaactggcaatctgcgaatgagtgctttcattgaaaataactccatagaacacgctatctatgatgttccccaaagcaccggtcagaataagagccacacagacgatataacctgttttgaaccctttctttatgattttatagagataccaccctatcaatgctactgcaacaatgcggaatgttgtcaggaataacttgccgaagatttccataccgaaagccatcccgttgttttcggtgaaatagatataaaaccaatcggtcacacgtatactttcgtgccagtacatgtgagttttaatccagaccttgatgatctggtcaataatcaatacggaaaagataacgagaagggcaattctccccttcgtgaatagtttcttcatgtgtttattataagttaaacataacgagctacaagtgccgtgcgtaaactttgcgcagctacttgtagctcgttacctgtagcctacttgctatctgttattttttaccactgttctttgcttcaatgcttaatgtagcatgaggaacagcacgcagacgttctgccggaatcaactttccggtttcacggcaaatgccgtacgttttattctcaatacgtaccaaagcagcttgtaatccttggataaacttcagctgacgttgtgccagtcgggtcgtttcttccttggagagcgtattagctccttcttccaatactttatacgtaggagatgtatcgtcggtatcattaccgtccagtcccatcaaacttttcttcaactgttcatagtcacgttgtgccaattccagtttctccataataatggcacggaattcctcgagttccgcatccgaatatctagtcttttctgccataactttacaattttaaaaggttaatcaatatagtattagtcttttatcacgttcacaaacaatgagaagtcgtcaaactccagcattgttccgtctttcacttcatctacaagttcaagagatgtgcctaaaacctggttacaaatataagtattatattcatttaccgcatcatctgtttgcgtatttttcgagattgttatttttattttgtctgtaatctcgaagccgcttgacttacgtatattctgaatacggttcaccagttcacgagcaataccctcgcgacgcagttcttcggtaatagtcacttcaagcgctactgtcagtttgccttcattggcaaccaaccatcccggaatatcttcactaaagatctcgacatctgatgcttcaataacagcttccgcaccatccagatttaatgtatactttccgtttttctccaattcaccgatcgcttcctgtgacatttctgcaacagcagcagctactgctttcatttgcttgccaaatttcgggcctaactttttaaagtcacatttcacttttttcaccaatacaccggctgcaccatcaacgaatctgacttcttttacgttcacttcattcataatcaggttcttcacagcttcgatatgagctttctgctcttcatctaccaccggaaccatgatacactgtagcggttggcgtaccttgatattcaccttgcggcgcaatgccaacaccatagatgtaacatcctgtgccatttgcatgcgggcttccagttccttgtctatcatttcttcctgatatttcgggaattcggcaagatggacagaaactacattgtcgcgtcctgttgctgtaatcaagtcagtatacaaccggtctgcatagaacggagatacaggagccatcagtttggcaactgtttcgagacaagtgtacaatgtctgataagcagacaatttatcctgtgtaaattcaccaccccagaaacgtttacgattcaggcgaacataccagttggacaaattatcattcacaaaatcagagatcaaacgtcctgcctttgtcggttcatattcattatagcatgtatctacctcctttattaatgtattcaatacagacaagatccagcggtcgatctccggacgttctgccatcggtacatccgcttctttatactcaaatccgtctacattcgcataaagcgcaaagaatgaatacgtattatataaggtaccgaagaatttacggcgaacctcttccactccttcaacgtcaaatttcaggttatcccacggagaagaattggtaatcatgtaccaacgcaacgggtcggaaccatacttttcaatcgtagtaaacggatcgacagcgttattcaaacgcttagacatcttgttaccgttcttatcgagtaccaaaccgttagagataacagctttgtaggacacactgtcaaataccatggtagcgatagcatgcaaggtaaagaaccaaccacgagtctggtctactccttctgcgataaagtcagccggatatacctgacggttatccaacagttctttattttcgaacggataatggatctgcgcgtatggcatagcacccgaatcgaaccatacatcaatcaagtctgattcacgcttcatcggtttgccgtctttcgataccaatatgacgtcgtctacataaggacggtgaagatcaatcttatcataattttcttccgaatattgacccggcacgaaacctttatccttgtatggattggatttcataaatccggcagctaccgatttctcgatttcattataaagttcttctacagattcgatgcatatctcatccgtattatcttctgtacgccagataggtaatggagtaccccaataacgagaacggctaaggttccagtcattcagattttccagccacttgccgaaacggccggttccggtagattccggtttccagttgatggttttattcaattccatcattcgctccttgcaagcggtagaacggataaaccagctatccaacggataataaagtaccggtttgtctgtacgccagcagtgcggatagttgtggacatgcttttctatcttgaaagccttgttgtctgctttcatcatcatggcaatgacaatatccaaagattcggcagcttgcgcagctttctcatcgtatttgccatccaccataaattgaggatcataagcatttttcacccatgcaccctgatattctttgtatttatctacatcaacacattcttttacgaaattctcatccaactcattcaacagatagaatttaccagttaaatccaccatcggacgagtttcgcctttcttattaatcatgaacaatgacgggattcctgcagcacgtgccacattcgcatcgtctgcaccaaatgtaggtgcaatgtgaacaatacctgtaccatcttctgtagtaacataatcacctggtattacacggaaagccttatcactaggcttccagttgccatcttcggatacctcaaccggtttcacccaagggatcaactgctcatattccataccgacaagatcagtacctttatattcggcaatcactttaaatggtacaagtttatctccagctttgtagtcctccaatttcagatcagcagcttttgcattgaagtgtacattcaataaagcttttgccagaacaaccgtgataggttctccggtataagcgttgtaagactgtacagccacatagtcaattttgggtcccacacaaagagccgtatttgaaggcaatgtccatggagtagttgtccaggcgataaaataaggagttccccattccgtcatttccggtttaggattcttcattttaaattgggcaacggctgttgtatcttttacgtcccgataacagcccggttgattcaactcatgtgagctcaatcctgttcctgcagccggtgaatacggttggatcgtatatcctttatacaacaatccttttttatgcagttgcttcaatagccaccataatgtttcaatatagcgattatcatacgtgatataagggtgcttcatatccacccaatatcccatccgatgagtcaggtcttcccactccttggtatatttcatcacgtctttccgacaagccgcattgtagtcggcaacagagattttcttaccaatatcttcttttgtgatacctaatgccttttctacacttagttccacaggcagtccgtgcgtatcccatccggctttacgcttcacctgataacccttcatcgttttgtagcgacagaaaatgtccttaatggtacgagccattacatggtgaatacccggcataccattagccgagggaggtccttcgaaaaacacgaacgaaggacaaccatcacgttctgtcatactcttggcgaaaacctggttctcgtcccatttcttcagcacatctttgttcacctgcgaaaggtcaaactgcgaatattcagtaaatctcttacccatagctgtctacgattttactatttacaatttacaatttgaggggtatccccatttttaagggtgcaaatttacaaaaacatttgtttagttgagcaaaaagctaagacttttaatcggattcgtgtgaagttaacgattataaaccgcctacagcctaaacaaaacaggtatctccttgttttagtgggaaacctaaaagcactttaacttatgaattacggtattagcattttattcagagcaatccctttggcgatggctattttttgcttcggatacggagcgtttatttatggttatggagatgacgggagtcgtgttgtggccggtcctgttgtgttttcactcggtatgatatgcattgcactgttttgcacggctgccactatcatccggcaaatcatacatacttataataaatcggccaaatacgttttgccggttataggctatctggcagccatcattactattattggaggtatctgcattttcagtaatgccacttccacctctgcatttgttgcaggacacgttatcaccggcgttggatttattaccacttgtgtagctaccgccgccacctcttctacccgattctctttaattccgaggaattcaaaagcgacaagtaatgaggttccggaaggagctttttcccttaatcagagacgggcattggtcattgttgccatcatcgtttcgctgatcgcatggatatgggcatttgtattattgagcaacagtcattctcatcctgcttattatgtggcggggcatgtaatggtcggtctggcatgtatttgtaccagtttgattgcgctggtagctaccatagcacgccagatacgtaatgattattcagaaaaagaacggaataaatggccgaaactggttttattaatgggatctatctcttttgtatggggattattcgtgattttggcagattccggaagtgcaaacggtaccaccggatatattatgctcggattggggttggtatgttacagtatttccagcaaagtaatcctgctggctaagatatggaggcaagaattcaaattagccaaccgtattcctatgattccggtatttacggcattggcttgtctgttcctggcggcttttgtattcgagcttgccactatacatgctgattatttcattccggcacgtgttttggtaggtctcggagctatttgctttacgctgttttctatcgttagtatattagagagtggcacgtcatccaaataaaaaatattctatcaaaagggcgtcactatatgccccggatagtgacgctatccaaggcatatagtgacgctatccggacagcatagcgtcactctttttatttcttgtatctcacctcatacaggtcattcctacggtctttcaagttgcgtacactaccataagtatgcagctcgttcagcaaatccaagtcaacatccgataccaaaatcatttcggtgttaggagttgcctctgccctctttccgtctgttggaaaagcaaagtcgcatggggtaaatacccccgattgggcatattgaatatccatattgtgcacacggggaagatttccgacacttccggcaatgactacaaaacattcattctcgatggcacgtgcctgcgcacaaacacgaacacgggaataggcattctgggtatctgtcaggaaaggaacaaataatatctgcattccctgatctgccatcaggcgggaaagttcggggaactcgacatcatagcagatcaaaactccaatctttgcacagtccgtgtcaaaagtattcagaagtttaccaccattaagtccccaactttttatttcatcgggagtgacgtgtaatttttcatacatttcgtaggttccatcccgtcggcaaaggaaacctacattataaagcaatccatcctcttttacgtatggcatactcccggttataatgttgatattatagctaatagccagattcataaaccgttcccgaatttcatccgtatactttgccaatccgcgaatagcctgtgattctcctttatcgttatacttcgacatcaaaggagcattgaaatattccgggaaaagaacaaaatcacttttataatcggatactgcgtccacaaagaattctacttgttcgaacaggtcatccaacgttttataactacgcatctgccattgcaccagtcctacgcgaaccgtagttttgggactgatatattcctgtgtaggtggctgataatagatattatcccactggagcaaacaagcataatgttttgattcttcatcatttggcagataattagtcattaccttacgaacgtgaaagtcattcgacaactggaaagtaagtaccggatcataaatctcgcgttgacgtacccgttcgatatattcttttggacgcattttgtcagcatatttatgataattcgggatacgtccgccaaacatgatcgctttcagattcaatgtttcgcaaagctccttacgatattcatacatacgacgtgcgagacgcaaaccacgatagcccgggtggatgaatacttcaatgccatacaggatatttcctttgggattatgtgtattaaatgtttccttacccgtaacctgtgcatacgtatggtcgttctttactttatcataatcaacaataatggaaagagcacaaccaactattttatcgtcaacgactgtgacgatctgaccttccggaaagattttaatcaacttctgaatctgctcacgagtccaaaatacatcgctaccgtcagaataaacacgggtaaacgattgggatagttgtacataatcttctatttgcagattgcgtatctgcactttattaatttttatcggatgttgttccataacaatacgtgtttttatataaagactgtgcaaaggtactgtttatctttatacattgtcattgcaaaattaaaaatgcattatacttaattttaatacatgcttcagaaatggctacagtgctttaacatcacataattttcatacagattcttgcaccgtttaatttgcgacttccgaaaattatcgtacatttgcagcgactaacattttatacccacagaagcagtgaacctgcttcaactccagtagcaggcatttttatgcctgttgctgccgtagatacgcggtttcgtacccccgtggggaacgttaatgcgtccccagcttctgtggagtgttagtcaacgggaaaggcggaaccgtttttttattcccgcctatcttaaaaccgttgtatcatgcatgaagaacaaaacaatgcacctgtaaaaaccgttcgaagcaatcggcaggaagctaattttcctaatctggaagaaaaagaaaacctaaaacagttttatttagcccaatcacgacgactatgccctactgtatcagtcgatcgttcggaattacaacgtttgggagcgttacaccacaaaatcaaacattttattaaagcgttaaccaacctcgaccgttcatgggaaaatgggatgccggagatgcaaaaggcttgcctgcatttcttttctttacaaaattcacctcgcacagagtgtcaaaagatttttgaagaatgggcgaaatggtcggactttctgatatcagcttcttgctatcgtggttttgtcagtcagatgttgcaggattatcaacgtcaattacgtgacttggaaaagctcttggacggcaaaccttccgaaactttggagaatgtatctgaccgttaagtcatacagatagatattgcatcgaactgacgctaaaagtagttcgtttcttgacggttttaattcttttcagaatataaatgagctaaatgataattttgcggagtgccctgaaagggcttaattctatagcgtagggcaacgccctacgaaaaaacgacaatctgaatttgcgccctgaaagggcataattgtatacagttccgccctttcagggcttgtggctggtgtgtctttttcgtagggcgttgccctacgctatataattaagccctttcagggcaccccaataaatatataattgtaaggctttcagcctaactgcaaaattcccatttaaccgctaaattcccatttaattaagaactgtactgaaatgaatgaaagtttttcctactataaagttgaaaaacataaaaacatctgccacctgcaaccaaacgcgtgtaatgcactagttgataaatagttggagcgttgcagatacctgcggcagataggttgcagataaagtatctgcaacacgttatataatcaaagaaaaagccttgattcctttatgcaaagctatgggataattggggtgactctatggagaaatggtggtgtctctacggggaaacgacagtatccttgcgtagaaactgtagtgtcccgccttagaaactctcgtttcctaccgtggaaaccgtaatttctaatgccggaaacgacaattccccgcctggaaacgggaagttaatatatacaattaacttttgccctcctggagaattggcttatgtaagatttatactgtgttgcagatactttgatctgcaacctatctgcaacagtatctgcaacgctccaactatttatcaactagtgcattacacgcgtttggttgcaggtggcagatgttttcatgttttttcaactttatagtagttcccaaaagtttcaaataaaaacaattatgacaccctaccatttggtacgatgtcataatcttaatagaaccatgccaagaaaccgaagtcataatggcatgatgaaattacactaacctaatttatttattttttttccaaagcttgctcatatcttccagtgtcttacctttcgtttcaggtacccaacgccaaacgaagatagcagcagccacacagattatgccatataaactatatgcaaacatcgggctgaagtcgtacagtgccgggaaagtagaagatacaatgtaattgaatatccattggaatgctacggcgattgctaccgctttaccacggatggtgttcgggaatatttccgagatcaacacccagcaaatcggtccccaagacatcataaagaatgctgcatacacaatcactgaaagtaccgggagaacaccctttattgccatgctatcacacattgctaccgcaaatgcacctacagccataccaatagaaccgattatcaatagtggtttacgtccgaagcggtctacagtgaagattgcaaccaatgtaaagacaatgtttacaatacccataataactgtctgcatcatgccacctccttctgcacctgcattttcgaaaatacgaggagcataataaagtaccgcattaataccgatagcctgttggaatacagaaagcaaaataccgatcacaattactgccactccataagtaaagattttctctgtcttttcatgagcagtagctttaatatcattaagaatttcctgtgcttttgtcttaccattgatcttttcaaggatcgaataagccttttcatcctgctgtatcaatacaagataacgaggagtcttgggaacaaagaacaataacagaccgaagaaagcggcagggaaagcttccgaaccgaacatgtaacgccatccttcataaacagtccacatatcagattcagcactaacagacagtacacctgctgcatctttcaaaataataggattttgatggtcgcccataatcaggaaattcacgaagtatactaccaacataccgaaaatgatagcaaactggttacacgatacaagcgttccacgaatattagaaggagcaatttcagcaatatacatcggacagactgcagaagccagtccaacaccgataccgcccaaaacacgatacaaattaaaagcaatcagcaaatccatgttcggctttccgtattcgaaaaacaagacttccggataataggaacctaatgctgaaaggaaaaagagtacggcagcaagccttagagaattacgacgtcccaaacgggaagcaaatataccggacaaagcaccacccagtacacagccaattaatgcactggaagatgtgattccatgcattactttattgtattgaaaatcagaggccgaaagaaaaaaagcctccaagcctttctctgcaccggaaataaccgctgtatcgtatccgaaaagcagtcctcccaaaatggcgacagaggttatcgaatataggtagagtttactaccctcgttcgttgtattaatcatggttataagtagataaagtagtgttgtagtagttggatttatatcaccacagatttcacagattgacacagataaaattcaaaataagagagaagaaaattaatctgtgacaatccgtgtaatctgtggtggggttaattagcaatacatattcagaattgcttcataaagctcttgtttaccgctagtctgcttcggttcaccgtttgctttagcataagcaactacatcttccaaagtcaacttgccatcttcaaattctttacctttaccaccatcgaatgaagcgtaacggtcagccaacattttcttatagggagattcgttcagcaaagcagctgcactttccaatgcacgagccatagcatccatacctgcgatgtgagcgatgaagatatcttccaggtcagtagagttacgacgagttttagcgtcgaagtttgttccaccgttacccaagccgccgttgcggattatttgcatcatagcttgtgtcagttcgtagttgtcaatcgggaattggtctgtatcccaaccattctgataatcaccacggttagcgtcgatagaacccaacatgccgttgtctactgctactgccaattcgtgttcgaaagtgtgaccagccaaagttgcgtggtttacttcaatgttcactttgaaatctttatccaagccatgagctttcaggaatccgattactgtttctgtatctacatcatactgatgttttgtcggttccatcggtttcggttcaatcaggaaagtacctttgaaaccacgggcacgagcataatcacgagcgatggtcagcatttttgccaggtgttctttttcacgtttctgatctgtattcagaagagacatatagccttcacggccaccccagaatacatagttctgaccacccagttcaatagttgcatcgattgcattcttgatctgaacagcagcacgagctactacgtcaaaatcagggttagtagcagcaccgttcatataacgtgcatggccaaatacgttggcagtaccccacaacagtttgatgccagtttcagcttgtttctgttttgcataagctacgattgctttcaagttagcttcgtattcttcgatgcttgcaccttcagaaaccaagtctacatcgtggaaacagtagtattcgatacccattttctgcatgaattcgaaacccgcgtccattttatcttttgcagcttgtatagcgtcagcattactattccaagggaattgttttgttccgccaccgaattggtcgccaccttcagcacacaaagtatgccaccatgccatagcaaatctcaaccaatctttcatcttcttaccgttgataaccttttcagcatcgtagtaacggaatgccatcggattcttactatctttaccttcgaacttaatcttttcaattcccgggaaaaattcttttgttgccataattcttttatttttaaaatggttattatttaaattgttaattatttatctgaagacagaaccggagccggtatgttaccggtcatcgacttttcaagacggtatttccattttgcgtacgcgtcagcatattcctgtcgttttgccacattaggctcaatcacatccagtttgtcaagcgtagcaaatgcctcattgttatccttgtagatacctgcaccgatgcccgcacctttcgcagcgcctacggaaccatccgtatcgtaaagctcgatagtagctcctgtgactcccgccaaagtatcacggaagatagaactcaagaacatattagcgtgtccggcatggatcatcttcacaggaattcccatttgctccatgatatcaatgccatatttaaaagagaatacaataccttcttgagcggcacgaataatatgatgtttgccatgcgtattaaaatccagtccacggatactgcaaccgatttctttattgttcagcatacgttcggcaccgttaccaaagggcagaatactgattcccgcactgccgataggagctttggaagccaatacattcatttcattataagatattccttcgggagcaatgttgcgttttacccatgaattgagaatacccgttccgttgatgcaaagcaatactcccaaacgtgtctgatctatggtatgattgacatgcgcaaaggtattgacgcgtgactgcggatcatagttcacttcactgttcacgccataaaccactcccgatgttcctgccgtagaagcaatctctcccggattaaacacgttcaaagaaagggcattgttaggctggtcgcctgcacgataagtaatcggtgtcccttctttcagtccaagctctttggcagctattgcatttacacgtccttgttcagcgaaggtcggcttaatatctgcaatcaaagaagaatcaaacccgtaataatccattaagaaatcagccacccggttgttcttgaaatcccagaacataccttccgaaagtccggaaacagttgtgcagatttctccactcaacttcatggcaatataatcgcccggcagcattatcttatcaatctgctcatagatggcaggttcgttttctttaatccacgccaacttggaagcggtaaaatttcccggcgaattcaacaaatgagaaagacatctctcctccccgattgtctcaaacgctttctgaccgtatggcaccgcacgggagtcacaccagatgatagcaggacgcaatacatgctgattcttatcaacacaaaccaatccgtgcatctgataagagataccgatggctttaatttcagcggcactcactccggattcggtcataatagcctgcgtagccaactttaagttttcccaccaactttcaggatcttgttccgcccatccgggattcactgcaataatattcgcttctgttttcggaaaaaatgccgaggatacacatttaccagtctccgcatttaccaaactcgcttttacagacgagctacctatgtcataacctaatagaaacataattttatttacgattaaacgatttactatttacgatttaacgctcaatgcccgactattaatactttaacattcaacgcctaatacttaatacttgatacttacttgaacaggggctatcttcttaccttattatatatcttcttatcaaatttataataacgggcagcacggtgagccactccttgttgtttttcttccaaaggaactacatattccatcattgctatttttttatggaagttacgcacgtccacggctttgtcgtatactaattcaaaaagagtccttaattgtgcggctgtaaatttacgcggaagcaattcgaacaacatggaaggattaaattctacgaactgacgaatataagtcattgcctcctttataatcagattatggtcgaaagccagtgttttcacgtctttcaaagcgacccagcaagcctggtgatcgtccagattcttatccaacgtacgatctatcttcaccatcgacaaatatgcaatggtaacaatacgctccacttttgactgcatagctctttccaaccaacgtacatctttcggattactcgttctgtttttagaaccaaatgctttaaactgcatcagattcacatttttaagtcctgtcagttcatacaaaactcgttgtgcagcttcatccagggcttcatccatatagataagacttccgggaagtttcatatcatgatatacttctccattatcctcacctgcacgttttacaagcaacactttcagttgttctccgtcaaaaccaatcactacacagtctactgatatatgattgtttgctaaaggtgtatttttctgtaaattttgcatatctatttctttaagacgatgcaaatatagaggctacaaaccatcaaaacaaaataagaaacatgctataaaacattgtttttcatataaatacatatcatacattctacaatatgaatagttagtgttatcttacgaattacaatatgtattttagtatttccgcgagtgagtaattgtataaagtacaaaaactagatggacgctttattatcagtacttttcatatcatttccagcagatagcggtaaaggtacttattgtattttaaacgatatgccattttgtaccttatcgttttttattctatctttgtcgggtaaatattaaaaaaactaaaatggaacgtcatccagtcattttatccattgccggctccgattgttcgggaggcgcaggtattcaagcagacataaaaacaatctccgctttaggtggctatgcggcatcggctattactgccatcaccatacaaaacacactgggagtacgtgccgtacaatctatcgcccctgacattgttcgtggacaaatagaagcagtgatggacgacctgcaaccggttgccatcaaaataggaatggtaaatgatattcaaattgttcgtgtgatttccgactgtttacaaaaatattcacctgcatacgtcgtctacgatccggtaatggtgtctaccagcggaaagaaactcatgacagatgaagctatagaagaaataaaaaaagaacttttgccgcttgtgacattaatcacccccaacatcgacgaagcgaaggtgcttacaggtaaaagtattcacaacattcaagacatgcaggcagccgccaaaatgctgacggacgattatcacactagcatcttgttaaaaggcggacatctggagggagacaatatgtgcgaccttttgcacacgtccgaatctatctatcatatatatgaggagaaaaagatagaaagccataacctgcatggaaccgggtgtaccctctcctctgccattgctacttatctggccaaaggataccccatgcgagaatccatccagcacgctaaaacgtatatcactcaagctattatcgcaggaaaagaattgaatgtcggacacggcaacggccctttatggcattttccggactccgttgcacaaatgtgtacattttgtgcggttgtatcataaaaatacgtaactttgcacccgcaattaaaaatcaattaaataataaaaatatgaaagcatttgtatttcccggtcaaggcgctcaatttgtaggaatgggtaaagacctgtatgaaaactcagctttagcaaaagaattgtttgaaaaagcaaatgatatcctcggatatcgcattacagatatcatgttcgacggcacagacgaagatcttcgtcagacaaaggttactcagcctgccgtattccttcactctgttatctctgctctttgcatgggtgatgacttcaaaccggaaatgactgccggccactcactcggcgaattctctgcattggtagctgccggtgcattgagttttgaagatggtttgaaacttgtttatgcacgtgcaatggctatgcagaaagcttgtgaagctactccttctactatggctgccattatagcattgcctgatgagaaagtagaagaaatctgcgcagcagtaaatgcagaaggtgaagtttgcgtaccggctaactacaactgcccgggacaaatcgttatctccggttctgtaccaggtatcgaaaaagcttgcgaactgatgaaagcggccggagctaaacgtgcccttccgctgaaagtaggtggtgctttccattctccattgatggaccctgccaaagttgaattggaagctgctatcaaggctacggaaattcatactcctaaatgtccggtatatcagaatgtagacgcacttcctcacactgatcctgcagaaatcaaaaagaacctggttgcccagctgactgcttccgtacgctggacacagtctgttaagaatatggttgccgacggtgctactgattttacagaatgtggcccgggtgcagtacttcaaggactgattaagaaaattgacggtactgtcaacgctcacggtattgcataagcatccgtaagaaagactttatctttaaatatatgaagtgtgttggtaactattgccaacacgcttttttatattaagcctattcatagcatacggattaacatgttgtataacaccccattacttttcttttccggcaaactttccgtatcttgctattgtttttattacaggaatcatttactcaaatttatgagccatgaaaatacatgaatatcaagcgaaagagattttctccaagtacggaatacctgtcgagaggcacactttatgccgtacagccgcaggtgtcatagccgcttaccggaggatgggaacagacagggtggttataaaagcacaggtattaaccggaggccggggaaaagccggaggagtgaaactggtaaacaatacggaagatgcttatcaggaagctaaaaatattctcggaatgagtattaaaggacttccggtcaatcaagtactggttagtgaggcggtagatattgctgccgaatattatgtcagttacaccatcgaccgaaatacacgttctgtcgttctgatgatgagtgcatccggcggtatggatatcgaagaggtagcccgtcaagcaccggagaaaatcatccgatattcaatcaatccatttattggtcttcccgactatctggcaaggcgttttgctttctccctctttcctcaaatggagcaggcgggtaaaatggcggccatccttcaggaactttataagatcttcatggaaaatgatgcatcattagtggaagtaaatccgctggcactaaccaagaaaggtacgttgatggctattgacgcaaagattgtttttgatgacaatgcgctctatcgccatccagaggtacatgctttatttgatccgacggaggaagaaagaatagaagcagacgctaaagataaaggattcagttatgtccacatggatggtaacatcggttgtatggtaaatggtgccggactcgctatggctactatggacatgattaaactttatggaggtcagccagccaattttctcgacattggtggtagttccaatcctgtcaaggtaattaaagccatgaaacttttattgcaggatgaaaaagtgaaagtggtcctgattaatatttttggaggaatcacccgctgtgatgatgtagcaatggggcttcttcaggcattcgagcagataaacagtaatatacctgttatcgtacggcttacaggcactaatgagcatatcggacgggaactgttacggaattacagccgtttccaaatagccacaacgatgaaagaagctgctcttatggctctgaaagcataataagtacccaaatcattaataaataaagcaattatgagcatattaatagataaatccacccgcctgattgtacagggaatcaccgggagagacgggcttttccacgccaagaagatgaaagaatacggaacccatgttgttggaggaacttctccgggcaaaggaggaacagatgtagacggcatccccgtattcaatactatgtatgacgcggttgaacaaacgaaagccaatacttctatcatttttgttccggcacgttttgcggcagatgccattatggaggcagcagatgcgggcatccggttaattgtctgtattgcggaaggaatccccacgctggatgtaattaaggcgcaccagtttgtcgaacaaaaaggtgctatgctgatcggccccaactgtccgggactgatctctccgggaaaaagcatggtaggcattttaccgggacaggtctttttagaagggaatgtcggagttatcagtcgtagcggaacacttacttacgagattgtgtatcacttaacagctaatggtatgggacaatccaccgctatcggcatcgggggcgatcctgttgtaggtcttcatttccgtcaactgctggagatgttccaaaatgatccggaaacagaagcaatcgttctgattggagagattggaggaaatgcggaagagcaagcggccgaatatatccgcaataatgtaaccaaacctgtggtagcatttattgccgggcaatcagctcctccgggaaagcagatgggacatgcaggagctatcatttcgggaagttccggttcggcaaaagagaagattaaatctttagaagctgccggtatccgggtagcacaagaaccttcggatataccgaaattattgaaaagataaactcccaaagagaaagaaaagacaaaagtagtcatatcataacagatgcagattcactccctcaaataagtaattacatacttatcgtttagagtaaatctgcatttattttacatacctttctttatacctaattttataagaagagcattcataggatatgcacagaagaagccgaaaagcatagccaactgcatcataaaccagaatatccatgtgtctttgggtaacggttcattgatgaacaatacaaaatagacaatcgccatccagccatacattcctacctgccaggacaaaagagaaaagaaatccgctttgaaagcacgagccaaggcattacctaccgatattttttccatctcccgaatagcatagaattggaaataaacaccaatcatcaaagccagaataaagtcaagtacccaattaccaaagagctgacttcctgccacagttacaggaacatagtttgtaaaccactctcctatgatatctgccaatgtacatcctgcaccacaatgaagcgccgacaaagctaccgattgccaataaggacgttgcattccttgcatcgacatttctccctgcatggccatatccatctccatattatctttcataccggacatatccattcccttcatatcagacatatctttcatgccagacatatccattttcatcccatcatcctcagctttcatcggactactccgtccaaacttattatacgcccataaagctaaataacttccccataatgcagataatatccagactgcattcattatcttcattgattgcggacgatgtgtcaggtctatggcaatatgtactgcaattccgatacctgaacatactaagaaaacggctattaaattgagcatggctgtatgttttttaaagattcagattacaaaacatcctttatttgtgaatagttcaccccattacttttaattttatcccgtcgaactattccccacacgagttgttatcattttataatcaaaacaatagaattatgagcagacgtagacaattagagcatgaagtatctgttgctcaagaaagaataaagaaagctgcaaaagatacaccgaaggatatcctgaaattatgggaacaagagctggtagacctggaattggaactcaataatatggtggatgatgaagaagataacaatgaggattaacagaagaaaggcgcgctagttacctagtgcgcctttctctattactgtatatgtattcagtattaattctttggcaatgcttcttttactaccattgaacgacctacatattctgcaccgttcaattgttcgatagctttagcagcttctgcatcatccggcatttcgataaacgcaaaaccttttgatcttctagtttcacgatctgtgattaactttactgaagcaactgttccatactcttccattacatgtctcaaatctgattccttaacattatagctaagatttccaatgtacaaattcataaaatacaaatataaaaaattaataattcaataagaaagttttaggaagatcttaattagagatggatatgctcaaataaatgagaagattcatgtaaaaaaatcaaatcgtaataaacctctttattgttgttggtacaaaggaagcattatttggggatattgcactatattctctcctttttctttctgcaaaacatcttttttatgaaaataggccaatacttaacgttcttattctttttataccaagccattccatgtaaactaccggattagtctttctgcaaattcttcgctacaaattcctcaaaaaacgttttcttatagtttccacctcctattcctatttcataagacttaataaaaatatcattggtatcaaaagagtcaatccgtgaggtattgacaatataggacttgtttatccggagaaactgtttagcgggcagttgctcatgaatatttttcagattcatcttagtaatcacccgctgatcttccaattggagaatggaataatcctttagtccttcaataaaaagaatatcactgaagtttatcttgatatagcgtcgttccgatttgatgaagatatattcttcctgtatctcctccactctttcggctgtttccgacaataacagtttatgatatgctattgccttattgactgctttcagaaaacggttcatttcaatgggcttcaccagataatcaatggcacttacttcataactatcgagtgcatattccgcatacgccgttgtaaagacaatcaacgtattcacgggaatgctttgcgcaaattctattccggtaattcccggcatctgaatatcaaggaaaatcagatcaaccgtatattcatttatataagcagacgctgcgatagcattattaaagctacccaccaatgtcagttgtggaatctgctccaccaatgacttcatacctttgcgagctaccggctcgtcatcaacaataatacaattcataagtttagatgtaagttgacattataagttgtttctttatcttctatctgtagcgtataccgtgattcataaagtaaatccagtctgcgtttcacattggccaaccctattcccccttcccgcttaacaggaacacggggcttagaattttcgcaacgaaacgtcaactgtttattatgcacagaaaaatacaagtgaacataagataaattgtcgctatccaaattatgtttcaccgcattctctacaaaagggataaacaataacggaggaatacagatattctccatatttccctcttgaaagattgtatattcaaaatgatcccttctcaccttctccaattcaagaaagctggtgagaaactgtatatctgcagtaagaaatacttctcttcttgtactgtcattcaactggtagcgaagtagattgtccagtttctccaatatctgtgaagcctcatccggagcatcctttaccaaaatattggcattattcagcatattaaaaagaaaatgcggattgatctgtttctttaattgttgcaattctgtctgtttagtcgccttctccaattcaagaatctttttatcggagacaacccaacggcggaatagttcaaagctcgtacagccacctgcacttaatagcagtactaatactccataagcaatactatcaaaagaaacagcgtggttatcctgtatacaaaacccacgaataccgtatcgttgatataatggagacagaaatataaatcctaataatacactcactaaattgactccgagaaacgaaatccaataacaccataacttgcgcttggccttatacaggaaacggggcactaaccaatatatattcagatagataggaaatgcaaaaaccaatatactaaccggatatgcatataggaaaccttctctagtaaaatctccatatacattctgaaagcccaaaaagagtataataaatagcaatagtaaattactgataagcctgaaacggtcatttaccagattcttcccccaatcgtatacattccaggtatctttcataattccaacattaaaccaatggtacacagtgcctcatcattatagccactttttaattgataacctcccggatataacaagtccaatcgttgccgtaacttgtcaaaagcaggtgctacttgcagactttccttttttcgcagacagtatgtacaaatgaatcgaagctgattctcttccatttgaaaatcgatccttatattttctccctttccattctctccacatacagttgtccgaatcacatattctatcacaggcataaacaataaaggaggaacttgtatataacgcacttcattcaggatgttgacttcaaaattaaactccggattacatagtttctccaacttcatataatcagtcataagatcgatatcatctcccaacaatacctgttgccgttcactttcataaagttggtatctaagcaaccgacttaatttaaagataagcaatgacgccttttctccatcttctcccagcaaggttcgtaccttattcaatattctcgaaaaaaactccggttggagttgatctttcaaatgatttagatcagtctgtatgctaatattctccaattcatttaatcgttgttgataggccacccaacgatgcagaaaaatagtaaaagaaaaagccaggaaatagagtatcagtgccaatgcatttatcaacagaaagaaagggagatcactgtttagtctttgcatctgttcgggtataacataatattgccctagaaaacaaatagcaccaaccatggcggtcagcataaatccaacaaggcaactcaaatatatgatatactttttatatctacgctgaaacagataaccgggaattaaccagtaagtatgcagatttatgattccccatagaatgacagaaagtaaaagactaactcccgtagaaagatttagccctaaactatcgctttcgacaaaagtgcctctgaacactaaaaaggagactacaagaaatatcccaatttgcttcagtaacgtatataatagtatcttaactgacatcaggcgataaagttaccatttttttagaacttatacttcattcccaccgaaacatacattgccggtttaaaatatggatcagtatctttagacatatcttcgaagaaagcctttaaagtgcgagtagtgtaataagctattctgctacacgacacaccggcagtagcagtgattgaaaaagaattccccatacttacttccggttgtaaacctacaataatgaattgctgggaaaacatagtatcttttccttctctttccaacaatgccaatgacccgttcatctctgccacgatccttagattcagatatttattcattttcattcctgccgatacttccatggcattcagcatcgaaactttaatttgataacgtccttcagtgctccaatcaaaataaatagcaggaaataccatcggataaccaaatgtgttgttcacagccaatccggctccaagagataaattggacttgaactgccggatgaaaataactcctccctgtcccagaacattcttcagttttacatcagaagaggtataaacacctgcaccaactgtcgtcaacaagagccattttttgctgatagggcgaatattggttacgctcaactgcatatttataatttgatctatgtctatgtaagattgaagattcttattattcattgccgtatagcttcctcctgccgaaatcatccaaagagttggctgatttctttcattcattttctgtgatacgggaatattgacgttcccttccacaaagcacatatcccctttcccgggatactgtccgttttcatctttatatcgggaagaagatatatacccggttttcacagtaacctgtgcctgtatattttcaggaagtaatagaaacaaggcgaacgcacttaacaaaataatcctcattcttttatctgttttagggtttgaatgagacaaaagtagagttttaccgatctgcgtagagagtttgtagaccaaacccggcattaagtagaccaaacctgtaaatttgtagcctgtttggtctgaatgtattatataaaaaaataaaagactacctttcaaccgaagatagtcttttattcatatatcattttttaattatccacaatggaaatacttatgtacgagatctaacatctccatcggttttccttccaaatccgcacgcaatgttttatcttcataaccacgaagtctgcggatgataccatcaatcattgccgggctgaatacattatattgttcaaagattgcccgttgttgttgcaagcaatcggcagaagcttcacagctatccggcagttgcgccagtgatttcagcttatcttcgttttctttctgatggatattcacatttacataagttttttcagcaatgtccagcgcattttcaatctcaaaaccatgacggcaggcaacagccaaaccagccaacagttgatacaaatctgccgaaccatccggagaacgcatttctacagtctgcttctggctggtgtcaaaatgactttcagcttccaacggatttgccaatgtacacatatctgtttttgcagcccatcccagaggtacacgcactaatacagagcggttacgatctccccaacaaacattggtaggtgcttcctgatgaggaacgagacggaaataagaagtaggattggtatttccaaaagcagtaattgacggagcaagcaccatcattccggcaattgccttgcgtgctgtttccgacaaaacaccgtctttcagcatctggttctttccgtctttcatgatacgcatgtggacatgcaagcccgaacctgctttacctgccgtaatctttggagcaaaggttacattgtatccatatctaaatcccaggttacgaatcacccatttggcaatcattaattgatctgctgcctgcgatacgggaaccggcaggaattctatttcattctgctcatagatataaccatccagcgtaaaattacccacttcggagtgtccatactttatttgcccgcctgtctgtgcgatgtaagacatacattgagtacggaactcattgaatttagcataaggacccgattcgtgataaccacgttggtcggttgcctgaaacataccagtatccggagctattacataatattccaattcgcccattgcctgaaattccattccggtaacttctgtaaaagttttgcttgctttgtaaagagtgtgttctggtgcactttcgaggggttcgccgtctttattgaagaaagagcacagcatagacagcgtcggaatctcggcaaacggatcaacgaatgctgtgcaaaaacggggaattacataaaggtcactactgcccgcttctataaatgagaaaaggctggaaccgtctacccgttctccacatgtgagaatagcttccagataagcttgattgttgatgacaaagttcagagttttcagacgcccgtctcccgccggatacataaaattaaccatgcggatatctttttgctggataaatgagataatgtcagcttttgtaaactctgaagttggtttttgaaggaatgccaccaactggttagcattcattgataaatcataattcataatcggttgtttttcgttgttgtatgattaaaacggtttgttgaatgccaaagataaggaaaagatggaaaatcgagtaagaaaagatttaattatttctctgttatgctgcatttacgtctattatcctatttaaaacgcttcagatctttcttctcaaaaatccattccggagtgtatagtttcccagtatccgtttcggtcagctcgtaccagggagaaaggtttcggctggttggattgaccaggatatgaatctgttgggcaggcatatagctttgtgccaggagaaatactttcttcccggtattcggatgaatggcaacatccataacaatcacagcatgaccgggtgaaccgcctttaataaagacatccccgggttgcaaggaagtataaagcacagctgggagttcacgagataaagaggcagttccggcatacataaaaaccatatcgagatagtttcgaaaagttttataggaataatccactcctttgcccgaagcataccattgaacctgattatcgttgacttttattcgatttccctccgcccatttcttatattcggcagtaaatccacttgtgaagttgaattttatatctgcataccgtttatgtttccacagatattccgcccgcaagcgtatcactgcatcggcacactgctgcaaatcacgattgcctatctccatatctacgactgcaaatgcggctgcctgattggctttttcttttccattgtaaagtaacactttactgcctttaggcaataatggcaaattgcgcaaataagttgtaaacgaattatcggagcaggtctctctaacatatcctgacggaggagcgattctatccgcaagcctctcctgtccccatgagtgaaagactatgagaagcaagcctgcacatattaacaaatacttcatatcggtttttcttattccatatccggacaaatataagtaattattattgaaaacgaagttgaatgtctgtttttctcccgattgaagacgctatcgtcttaaaaatatgtaatatcggattctgactaaaacaaagtggcctatactctcttttttctgtaagaatagtgcgaactttgttttctacaaattataatagtgtttttatggaacaggtggtagatttagctttaccagaatactttgaaagaatatccgcagaagctacctttcaggagcaattgtccgtcatagatatggataactcccgtcgttcaccggttcaagtcaaaaactatccgatacgtttgaaaggctattccctcatctttgttctttccggagaaattacaataggaataaactatttatcgcatacactgaaaaagaacatggtgatgcaggtgtatccggatgatattatagagcacacagcttattcagccgatttcaagggctatctcatcattcattctgctgaattgaaaaaggaaataatggctatgacatccggcatccgtctgcaacaggcgggtcagttgaagaaattacataccaggcaagagttgagtgaggaacaaagcctgcgtttgagaaaacaggttgaactcattaaaagttatattcctgataaagaacacgtctaccactcttatgtcatcaagaatcagattataaatctattctttgaccttgataactgccgctggcataggtatggcgacggagaacggcaccaatagtatcttccaccgggatgtgcggattgatacgtgctggctgatagaggtcaacataatctgtgcctaatcgtttcaaagtgtaagccagataattttgtacgttctgcggacggacgtcaataccatagaaccgatcatctggagtgagcattccaccaaacttgacggcgataaaaatgtcttcgcgcttccgggttttcaaagcctcgcggatcaccagttcactttctccgtgaccataaaagtcccctgtgttcagatacgtaattccactgtccagcgcggcatgtatcgtgtcgactccctgctgaacgtcagccattctcatggcacccagtccgatacgtgaaagggtgataccattggtttctttattcaaatacttcattgtttcttttattatatagtactaattcgattgcaaatttcggataaattccttcatgataccagagcaatatccgttcatttttggtcattatccgtcaagaagcctctttctcatgaaatgtctcaaacatactgattataaaaaccaattgactgcctcaactgttttatttgaatagaactattaaaactaccgtcacatgaaaaaggatattctaaaagacctgctggcaaagcccggaaagaaacatttggtatcggattttgactcgtcattcactagcgatttatccaaacaagacgctaaagagcaactggcaaaggatattgagaagctttcggagctgcaaagtatgctttatgcacaagaccggtattcaatcctgattatctttcaggcgatggatgctgcaggaaaagacgggactatcaagcatgtgatgtccggcattaacccacagggatgccaggtgtattcgttcaaacaaccgtctgctgaagaactggaccatgattatctctggcgtatcaatcgctctctcccggaaagaggacgaatcggcattttcaaccgttcgcactacgaagatgtgctgattgccaaagtgcatccggaaattattctatccaacaagttaccaggtgtcgaaaccataaatgacattgatcccgacttctggaagcgtcgttatcgacagatcaacgattttgaacgctatctgacggagaatggaacgattgtcctgaaattctttctcaatgtatcgaaagccgaacagaaaaatcgattcatggagcgactggacgatgcatctaaaaactggaaattctcttcggcggacatcaaagagcgtcaattctgggaggactatatgaatgcttatgccgatgtactgacggagacatcaacggaactggctccatggtatataatccctgccgataataaatggttcatgcgttacgcagtaggacgaattatttgtgaccggatgcagcaattggatttacattaccccaaactgtcgaaagagggattggagaggctggaagagtgtaagaaaagtgtatcaaacattaacttttaaatcacttgcgcttatcctttttcattctaactttgtagaaagacctacataaagaactaaaattgataagcttatggacatccaaacttttattcaaaatttcaaagaggcattcggagaaaatgctgaattgcctcttgttttctggtactcggacgagcaaaaaggagaaacagaaaagataaacggttgcttcttcaaaggtatgaagacggtaagagatggtggtattatcagcctgaatactgaaaacatcggttgtggcggcggtaaattctatactggcttcaccgaaatgccagaacgtgtaccgactttcgtttcgctcaaagagaaatacaaacagactcctgaaatggtcatcgactttatacagcaaatcggagttccccgaacagaaaacaagtatcttcattttgcacgtatagataaggtagaaagccttgaagaaatagaaggtgtcgtatttctggcaaatccggatatgctttcgggcttgaccacttgggctttttatgataataacgcagcagattgcgtcgtttctacctttggttccggctgtagtgctgtagtgacgcaagccacgatagaaaatcgtaaaggaggcaaacgcactttcctcggtttcttcgacccatcggttcgccctcatttcgaagctgacaaactaagctataccatacctatgtccggatttaaagagatgtatgagacgatgcgccaaagttgtctattcgatacgcatgcatggggaaagattaaagaaagaatgaacggataatctcccataacgaaattgcatatcattatacaattatcgggacattaggtatgcttattccgaacatacaaggcttctctttcgttgttataggaagaaactgccacttgatactgacaattcattatcaagacagatattttctgaatatcaatccctgcctgtcctattttgtttcccagtgtggaacttatagtttcacgctttgaaaccatcagtttcacaccgagaaaccattagtttcatgccgggaaactaaaagtttcaagcgcctgaaactttcttttcctacaggattaaaataatatatcagtcggattaaaccttttatctggagaaaagtcttattattaatatattatcgttctattcaacattaaagtatcaacgaaaatggaaacatccgtcaaactctattcgctgaaacacagcaatgtgaaaacctacctgttcgccttactatttgtagcgggtaacattgcacttccacaattatgccatcttgtaccttatggtggtcctaccctgttacctatttattttttcacgctgattgcggcttataaatatggttttcttgtaggattattgactgctattctttcaccagtcatcaatcatttattgtttgccatgccctcggaagcggtacttcccatcctattaatcaaatcgtccttactcgccggagcttcagctcttgcagcacgtactataaaatcggtttcattactggccattcttggtgtcgtactcacttatcaagtcataggcgttgcatttgaatgggccatcgtcggaagtttctacgaagcagtacaggacttccgtatcggtattccgggaatgttactgcaatggttcggcggatacgccctcctgaaagcaattgccaaactctaaactaatatagaaagatggacagaagggattttttaaaaacagtagctatcaccggagccgccttgactatacagcgttcggaggctatggaggtgttaactcaaacaatcaataaagcaaacggaagcaatcctgatctggtggccgttatgggcggagaacccgaagagatgttccgccgtgccataagcgaactggggggtatgaagcaattcgtgaaaccgggacagaaagtggttgtaaaacctaatatcggttgggataaagtgccggaactggcaggaaatacgaatccgaaactgattgaagaaatcgtcagacaatgttttgccgccggagctaaagaagtggtcgtgttcgaccatacttgtgacgattggcagaaatgctacaaaaacagtggtattgaagctgctgccaaaaaagccggagccaaagtaatgcctgcacatctggagtcgtattacaaaccaattgatctgccaaaaggcaaaaagatgaagaaagccaaagtgcacgaagcgattctggattgtgatgtatggatcaatgttcctattctgaagaatcacggaggtgccaatctgactatctccatgaaaaatcacatggggattgtgtgggatcgcggattcttccaccagaacgatttgcaacaatgcatcgcagatatctgtacattacagaagaaagctgtactcaacgtagtagacgcctaccggatcatgaaaacaaacggtccccggggacgctctgcatccgatgttgtactggcaaaaggattgtttatctcaccggatattgtagccgtggatacggctgctgccaagttcttcaatcaagtacgtgagatgccactggatacagtaggacatctcgccaatggggaagcattgaaaataggaaccatgaacattgacaaattgaatgtcaagcgaattaagatgtaaaacaaccatgttaagaaggctacgtattggaatatcagcacttttatttgtgctgatttctttcttttttctcgatttcgcagaaatattaccgaacagttttcatcggctggcacatttgcaatttattccagccatcctttcactaagtataggtatcttattatttctcattgtgttaacgcttttattcgggcgtgtatattgttctacaatctgccctatgggtatcttgcaggatgtgattgcacgaatttccaaagcaacgggaaaaaagaaaaaaagatatagttacagtcctgcaaaaaacaaattgcgctggggtgtgctcggactgacagtggtcgggtttctatgtggatttacatttattgttggtttgctcgatccgtacagtgcgtatggacgtgtagtagtgcacatattcaaacctatctatatgctggggaataatctgctggaatcactctttgccagatttgacaattatacattttatcaggtagacacctccatcttgagcatttcttcccttctcatcgctattattactcttgcagtcatctttgtaatggcatggaaacatggacggacatggtgcaatacgatttgtcccgtaggaacaatattggggttattgagccgattttcattattcaaagtccgtattgatactgccaaatgtaatggatgcgggctttgtgccaccaaatgcaaagcagcttgcatcaatagtaaagaacacgctattgattatagtcgttgtgtagattgtttcaactgtttgggagtatgcaaacaaaaagcattagtttacgccccttctttaaaaaaacagtctgatgtagaaacttctgcaccatcatcaccggatttggattcatctaaacgccgttttttggttgccggtcttgttactgccggagcaacccccaaactcatctcccaagccaaggaatctgtagcaagcttggaaggtaagaaggcatacaaaaaggaaaatccgatcactcctccggggtctatcagtcgggaacacttccaacagcaatgcacatcctgtcatctttgtgtcagcaaatgcccttctcatatcttgaaaccggcttttatggaatatggcttggcaggcatgatgcaacctactgttagctttgagaaaggattttgtaactttgactgtactgtctgtggagatgtctgtcccaatggagcaattcttcccataaatgtagagcaaaaacatcttacacaaatgggatatgttgttttcatcgaggaaaattgcattgtttatactgatggaaccagttgcggagcctgctccgaacactgccccacacaagcagtagcgatggtgccgtataaggacggattgacgattcctcatgtaaataaagaaatatgtgtaggttgtggaggatgtgaatatgtttgcccagcccgtccattccgtgccatctatatcgaaggaaatcccgtacaaaaagaagcaaaaccattcaaagaaagcgaagagcacaaagttgagatagacgatttcggattctgaccggcatggtgccggagcagagtttccatccgtgttttatgttctatgacggtttatttcaaatgtgaacaagacagatggtatggatttaaaaaaaactatccattatattcctcctactttcaataaattcactaaattcgtggcgaactaaagaaagcaattcatggaggtattcacaaataactggaatagccggaaatatcagattggctatgcactaagcggaggatttattaaaggatttgcccatttgggagtcatgcaagctcttttggaacatgatattaaaccggaaatcatctctggagtaagtgcaggggcacttgcaggtgtcttttacgcggacggcaacgagccgcacaaagtacttgattatttctccggacataaattccaggatttaaccaaactggtgattcccaagaagggactatttgacctctgtgaatttattgattttctccggactaacttaaaagcaaaaaatctggaagagctacaacttcccctgattatcacagcaactgacctcgatcacggtcgcatggttcactttcatcggggaagcatagcggaacgggtcgccgcttcctgctgtatgcctgtcatgttttctccggtcaacatagacggcactaactatgtggatggaggattgatgatgaatcttccggtctctaccctgcgcagggtttgcaataaagtggtagctgtcaacgtaagtcccatcatggcacaggattacaaaatgaatattgtaagcattgctatgcgttcattccatttcatgttccgcgccaatacctttcccgaaagagaaaaatgcgatttattaatcgaaccatacaacctatacgggtacagtaacaccgaactggaaaaagctgaagaaatcttcgggcaaggctataatacagctaacgaagtacttagtcaactgttggaagaaaaggggaaaatatggaaataatctcctatccatcagaaacaagaatgaatacgaatattaataatctactctatatgaatgacgaaaataaaataattatctaccaagtattcacccgcctgtttggaaataacaacaaccactgtgtctacaatggagacattgccaccaatggttgcgggaaaatggctgatttcacgctcaaagcacttggtgaaatcaagaaattaggtgctacacatatatggtatacaggcatcatcgagcatgccactcaaacggactatcgccgttataatatcagtccggatcatcctgctattgtgaaaggaaaagctggttctccgtatgctatcaaggattattatgatgtagatcctgacttggctaacgacgtgcaaggacgtatgaaagaatttgagaatctggtacatcgcacacatcgcacaggtctgaaagtaattattgattttgtacctaatcacgtagcacgccaatatcactcggatgcacaaccggacggtacgaccgaattgggagctaacgatgactccagccaatctttcagcccatataataatttctattatattccgcaagcggaacttcatgcccagtttgatatgaaagacggtgcagcagagccttaccgggaattcccggcgaaagctaccggtaacaatcgttttgatgctactcccaatatcaccgactggtatgaaacagtgaaattaaactatggagtggattatcagaatggcggtacctgccacttctccccgactccggatacttggataaagatgctggacattcttcttttctgggcatcaaaagacattgacggtttccgctgcgacatggccgaaatggttcctgttgaattctgggaatgggctattcctcaagtaaaagaggcttatcctgaaatacttttcatcgcagaggtttacaatccaggtgaataccgtaactatctgttccgcggcaagtttgattacctgtatgataaggtagggctgtatgacacgttacgcaatgtagcttgtggatatgaatctgcatccgctatcactcattgctggcaaagtctgaatggaatagagaaaaagatgctcaacttcctggagaatcacgacgagcaacgtatcgcttctgatttctttgccggcaacccgcgtaaaggaattcccgcactgatcgtttccgcctgtatgaacactaatcctatgatgatctacttcggtcaggagtttggagaactgggcatggatagtgaaggatttagcggaagggacggacggactactatattcgattattggagtgtagacagcatacgacgctggcgcaacggaggtaaatttgacgggaagatgcttactgaagagcataaacacctctactctatctaccaaaaagtactgacgatttgtaatgaagagcaggcaatcagcaagggagtattctttgatttaatgtatgccaatataaacggatggcgtttcaatgagcataaacaatatacttttatgcgaaaatataaaaatgagattctgtttttcattattaatttcgacagtcaactggtagatgttgctatcaatgtgccttcacatgctttcgactttttacagattcctcaaatggaatcttatcaggccactgatttgatgacgggcgctaaagaagaaatcagtctattaccttataaacccacggatgtttcggtaggaggctataacggaaagattttaaagattactttttaaataataatgtaattcaaaaagcaagttttagccaaacgaggacaaccgattgataatgtgcgggtaaagtcctttgtttggctttccttttggacggcaaaagccgaccatagacaaaggtaagacaaagttcagttactattccattacctgcgataaaactgtaaactggttataagtcgctatttgtctgcatcttgcgttgtcgtgtataacctcttgtaactcaaagtaaactaattttgtaacgtttaaaactttgagcaatgcgaagtacatttaaaattctattctatctcaagaggaacaaccctaaaccggacggaacagtccccgtaatgggaagaatcactattgacaaaactatcagccaattcagttgtaaaatgactgtaccacccaatctatgggataccaaagcaggaaggctgacaggaaaagtacattggcagtaaaaacgaaccttgcattggataaaatccgtatggatattaaccaccattatcaggaagtgatgcaagccgatggctttaccacagcagataaagtaaaaaatgcctatctgggtttaggggtaaagcaagacacgttcttagccttgttcgctaaacacaatcaggagttttcccggaaagtagggtacaacaggtcagagggtacttattccaaatactgtacggtttataagcatatggaaaactatatccggcaggaatacaaacgggatgatatttttctgaaagagttgaaccttgctttcgtcaatggctttgaacattacctgcgtacagtgcggaattgttccactaattcaatatggatgtatatgataggagtaaaacacattgttaccattgcccaaaattcaggtcaattagcaattaacccatttgccggatacctgattagccttgaacccaaagacaggggattcctaagcaaagaggaacttaattcgcttgtaagtgccaagatgaagaatgcccaatatgaactggtaagggatttgtttgtgttttcctgtttttgtggacttagctattcagacgtaaagaacctgacgaaagataacctacaaacctcatttgacggtcatttatggataattacccgcaggcaaaaaacaaatacagattcaagtgttcggctattggaagttcccaaacgaataattgagaaatacaaaggctatacaagggataacagaatatttcctgttccgagcaatacttcctgtaataatatcctaaagaagatagctaagcagtgtggaattaaaactcgtttaacatatcacctggctaggcatactttcggaaccttattaactatttcacagggagttccgattgaaacagttagtcggatgatggggcataccaatattaagactactcagatatacgctaagataacgaaagagaaaatcagtcaagatatggaaatcctatcccataaattagaatctttggaaaagcaggtaatggaaagaatatgataaataaggcaagcttaactgcttgcctttattctactaacgtttcaaataataaaggattgatgacaatactatcattatttttttctaaatttgtggcgttaaaaaagtaagtataaaaatgtatcaacgtttttcctcaaacacacctcccccggtagcctaaaaggctgaataaccggatttaattagattttgttcctgcatttctgtagggattattttcatatacttattattagtattcaaggttgtttagcctgtaatcaggtattcatttattaataatttaaacaatcttgaaatgaagaatatcaaatatattctcatggttcttcttggaggagccatgtacggtacgatgtcatcatttgttaaactatcgtactcatgggggtataatgccgccgaaatctcttttgcacaagctgcattggcagcaatctttcttggaacttatactttagttacaggaaaaagtattcaagggaaaattactcgaaaagatttattaccgttgatattgaccggaagtgctatcggactgactaattatctttattatcagtctgtaagttatatttccgcctcactggctatagtgatacttatgcagtttacatggtttagcctgtttttggaatggattattttcgctaaaaaaccctccagactcgaactcctgacagttttctttattcttattggtacagttatggcagggaatctttttgattcaagagcatggtcattttcattaaagggaatcttattggcgttattcgcttccctgacctatgctatttatatcgtagcaaatgggaggattgggaaatgtgttcgatggcaatcgaaaagtacgtttataatgattggttctgctctcacaatttttatagtgaatagccaaacaattattatagataatcatttcggtggaagctttatgctttgggcgttattccttgccataatcggaacaactattcccactgcattgtttgctgccggtattccaaaaataggagttggaataagttctattctgatgacgatagaattgccagtagctgttatttgtgcagttgtagttctgaacgaacatatcagcccggtacagatagctggtatagttgtaatgcttacagcaatctcgataataaattattacaaatcattaaaaaacaaaagtaattaaccatgttttacataagtgaaatacaatatactgctccggcagaatataaaacagaattgcaagaagtgatttatacaactttacaaaaactcagaatacgctttgaacgcgttgatactgatgaggttatttcaatggaagactgtatccctatcaatagaaaacttgacatgaaaatggtcaaaaccctctttctttgcaatcgacaaaaaactgatttttatctttttattactactgctgataagcctttcagggcaaaagaattaagtgctgtaataaatataccgcatttatcatttgccccagtggatttatttgaaaagatgctcggaacaaaagtcggagcagcgactatttttagtgtgattctggataaaaataatcatgtacaggtattacttgataaagatgttgtgtcagaagaatactatggttgtagtgacgggacaacaagagggtacatgaaaattaagacagcaagtatcgtcaattattttttggattttgcgaaacacaaaccaaccataattgccatatgattgcatctattctaaaaagtatgagattgttcgttctattgaatgaaccctcacaggaaatatctgtaaatgaaatggaaaacgcttatcttgattttgtggaacaaataaaactaattaatgcttccaaagattattcatatgcttttaggacattgaattttgttcgtattgagttatcgaatacgaatcggggaaaaaaatgtacttgaacagatgtattttcagaaatcattatcatttatcaaatccgagttagagttgttagaaaaacaaatgatgtatcctaaattattcattcaaaaagatgatgggtttacttctgatttatatttggatactaatgaagtatcttatgttgatattatggagattatagtaggttttttttatcttgcaggaataaaaacgtctgatggaaaggctgtttctttaagtcgtcttactaatagatttgaacattttctaaattttcagattagtaatgcatataagaaagaggaagaagtcttgcaaagattacctataaaacgtaccggatttttggacaaattaaaaagcctgattcacaagaaaagtagtgacaaaggatacaaaagttgattttgtatttttaatcgtttgataattagagtaatgagagttatttataggggagtagatgaactattcccctattttgtttgcttcgttcttccgtcctttgcttcatcaatgcattgagataacgaattaataatctcaaaaatgaagtgaaatgtatatcaacaacgaagattttgaaaaatggatgcagaagctatccaaaaagctaagtgaaatcggtcaggatttgaaatccctgattaataccgataaggtattcagcgaggacgagaaactactcgacaatcaagatttagcctttcttttgaaagtatccaaacgcactttgcaacgctatcggtcagacggaaagctaccctactttatgataggtcataagacttattacagagtgaacgatgttcgggtattcgtccatacatatatggactactgggcatcccaagagtttgacaagaagcacccgaaagaagacgaaaaagatgaataattccgctcgtttagtctaatgcggaatagtgcaaaggaaagaggcggttctcggttcatcgcctcttctttaacgctccgcatttctcaaaaacaacctcgccctccggctctgtttgttttgcgaaattaagcaagagggaactggacttcgtcctgttcttcctcttgccctgcggggcaaagccttcggctttagtgctttatactaaagcacagttataacacttgctataactcgaattgatatacgattctatttgagcaagttagatatatgaatagctataaaatagttataactatggctaaacagaatagaaacatcatatttacaacaatagcgatagaggcggaaacggacaagttgatagaaaaactttgtaaacgctattcactgaaaaaaggagagattacaaaactggctttcctctatctggataaggcacatatcaaccctgccgatgctcctgaatcggtaaaatcggaactatccaaaattaacaaacgacaggatgatgtaatacgcttcatccgaaaatacgaggaagaccaacttaatccaatgataagaacaagtcattctatagccgtccgcttcgatagtagtgtgaaagaacaaaaggaactgataacctctgaaataaatacctctcgggaattacaggataatgttttgaaaaagataaccgaaacatttaatcaacatgctggagtgattaacaaccaagccaaacaaattaatgaccttgccggagtcataaattcatcatcaaagaagcaggagaggaacaataacaaacttttaaagctgatttctctatattcggagcttgccacctgcggagtaatggacggcaaaaggaaagagaacctaagaaacgagattaacgacctgataaacgagtaacccgtgaatatagatttcccgccaccctctaaaggcacgtataataatgcaggcagtagtcggaggctcgccaattatttagagcatgaagatatggaacgcatggaacagggaatctatacagagggatttttcaacctgacagatgataatatctataaatcccaagtaataaaagatatagacagtaatatcggtcagcttctaaaaacggatgccaagttttacgctatccatatcagcccgtcagaaaaagaacttcgggcaatgggtaacacggaacaggaacaagccgaagccatgaaacggtatatccgtgaagtacttattcccgaatatgccaagaacttcaataaaggattattagcagaagatataaagttttatgggaagatacattttgacagggacaggtcagacaacgaactaaatatgcactgccatttgattgtgagccggaaagaccaatccaacagaaagaagctatcgccattaaccaaccataagaacaccaagaaaggaacggttaagggcggtttcgacaggaagaacctgttccaacaggcagaacaaggatttgacagattattcggttatgacaggcaactaactgaatcctttgagtattacaataccatgaagaacggaagtatatccgaccagttaaatatacaggaacgggagatgaaagaagctacccaaaaacaaactactccgcaaaatactatttccggtgaaaaagaaaagaagcagacggtaacaccacctaagataaaaaggaatcccaaacgagggcaaagaagataaaccgtaaaaaagcaataatatgaacgaatacgaggaaatccgtaaagaaatagacaactacctgatgaagcggttcagatatcgccgttcccttgtacggcttacacccgacaatatcgtaagcacccggagaaacagccggatagacctgtatttacgtgttaggagagtggaaagtattttcccgcccgattgcctcattattgcccgaatttgctttaataaagagcgtgtcgggaatggcacacactttgttcgtttcctgtcagaaatagccttaaaatacggctacaagcatatcggaatagaatccaccaacgagaaaagcagttcatttgccgaaaagttaggtttccattcgatagacggctctaactatgcaatattggtaaagaatctcctatcatattttcaagataggagataatataattctttatttatttgatttacaaaggtacattccggcaatagaacgccaacaccgagccgcaagcggtttatagaaatttcttcctttttgcttcacaaaaagagtaaatttctataaagtgttgtcttatctattccctgcatgaatgagatgtatatcaattaaaaaaagaaaaaaatatgttgttgattagagattaaatgcgtattttcgcagtgagttatttgaggaaatacagcgcaaaacgctgaaattagcacggttgccaaatcgttacctctatggctaagaaacttcgcttatagtcttttgttcaaagatttatatccaaatagttacattttaaataaaaagactaagatctgtatactcttcatccctcggtcacttatgaatgaccgggggattattttatgcacatcactcaaacaaatattctcaaaggctgtttaggtagataaataatcctctaaactcaaagcttatgaagaaatttatgatttgtgcaatcgcattgtttctgctattatctacatctgtctttggagatacccctcccggcaatgtacagtcgactttcaagaaaatgtatcctaaagcaaatggcgtcgcctggtcacaagacgacggatattattgtgccaactttgcaatgaacggatttactaaaaatgtatggttcaacgttcggggacaatgggtgatgacgcagactgatcttgtcagtctcgaccggctgaccccaacagtctataatgcctttgtatccggcccatacgcaaattgggtggtagataatgtgacaatggtggagtttcccaaatggcaggctattatagtaattaaggtagggcaagataatgtcgacatcaaatatcagttattctatactccacaaggggtattgctcaaaacgcgcaacgttagtgatatgtatgatattctcgggccaagtacctttctggaaaactaggaactgaattatataatagggtaataaacgagaaagcccccgcagatattcaataatatttgcgggggcttcttgatttaaagataaaattattttttctttctaagtactacagcggtacgggcaggaatatagagtttcagccactctttcttttccttcttgtacagcggatcggtaatagtgaagtgcacgacagagtcgtctgctaaaccatttcctccaaatgctacatcgtcggtgttcagtatcacttcataagctcccggagttaccaggaatccataatcagtgaatgactgctttggattaaagttaaagacaaatataaggtctttccgttcgtatgccaatacctgatcgccatcattatgccatatttcctgaacaggtgttgcctggaaatctttcacactcttgagaactttcagcatttctttatcaaaatcccccatatagtgataggtcagatttttgttgtccaccaaatcccattggcggcgggcatatttgcacgaccatccgttaccttcacgcgggaagtcaatccattcgggatgcccgaattcatttcccataaagttcagataacctccgttgatagtcgaagaggtcagcaggcggatcattttatgcaaagcaataccacggttgacaacataattttcgtctcccttctgcatgtgccagtacatatcggcatcaatcaggcggaagataatcgtcttatctcctactaatgcctggtcatgactttctgcatacgaaatggtctttacatcctggcgacggttggttacttcccagaacatgctggaaggcttccagtcttcatcgatcttttctttgattgtcttgatccagtagtccggaatattcatggccatacgataatcgaagccgtaaccgccatcttctactttggcagccagtcccggcataccggaaacttcttcggcaatggttatcgccttcggatttacctgatgaatcacttcattagccagtgtcaggtaacaaatcgcattatcatcctgatgaccgttgaaataatctccgtagttacagaaagcttcacccagtccatggctgtaatataacatagaagtcactccatcaaaacggaatccgtcaaatttatattcttccagccagtacttgcagtttgacaacaggaagtggatcacttcattcttgccataatcaaagcagagagagtcccaagccggatgttcgcgacgagtgcccggataaaaatactgatccggatcaccggcaaagtttcctagtccttctacttcattcttcactgcatgtgaatgaacgatgtccataatcacagcaatacccatctcatgagcagcatcaatcaatgcttttagttcatcgggggtaccaaaacgcgaagaggcagcaaagaaactggatacatgatagccgaagcttccataatatggatgttcctgaatagccataatctggatacaattatatccttcttcagcaatacgaggaagtattttctcgcggaattcgttatatgtgcccactttttcctcctgctgtgccattccgatatgacattcataaatcaacagcggattcgtgtcgggcttaaatgttttcttcttgaatttataggggttctccggagcccagacttgtgcactgaatattttggtctgttcatcctgtaccacacgtgtagcccacgcaggaatacgttcgccttgtccgcattcccaatatacattcagtttgtagagatcgccatgatgaatggcatccgccggcaggttgatttcccaaatgccattcttttgttttttcagcttgtaggcagctttttcctcccaattattaaatgtacccaccatataaatatgagtagcattaggagcccattcacggaaagtccaccccttatcggtgcgatgcaatccaaaataaagataccccgatgcaaaatctgaaagggtttgttttcccttattcgtcaattcagcttctttgtctaatacatgctgatggcgtccggtgatagcaccggcaaaaggctccagccagggatcgttttttacgagattaagtgtcttttccatatcagaattgaattaggattatgcttttacttttacgattactttcttcacaccatctggagtgataccgggagcatgaccgtcttgcgggaaaaagatagcaaacattcccggttttacggcaacgtatgtttctgctaatccttcgaagaaagtaatatctttttcctcgttgtaaggtgcatctgccggaacacagtctttagcagcagtataccccattatttctgttcccgacaatgggatttgaatatcaataaattcgttatgagtttccagtttggcttcctcttttgttttaggtttggtttgtgcaatattcaccaacagatcttttcctttcagttctgtcttaccaacttccatggcttggaggtcatgagacttcaagaattcaatagcctgtgcaaacagagggtttaaagacgcatatttctccagattttctaaagtatctactaccatataagttaaattttaaagtttatattctaggcattatttattcaaaatcatcaatcgtataatttataaaatcggcaaaccgtttgaattgccggaacactttgtctatctgttccaacatatccggtcgggtaaagaagtcatctggaacattataagagcaaacatattctttacatttcaaataatcaatgtacttgaaatctttcggaaaacctttcggagctgttttcagaaaatcctctcctatcaccgggaagtatttcttaaactccggatcttctacgatcgcaacaaactcttcgatattatcatagatagattgtcgcactgctttcaggatattggtaggcagacacaggcttcctccggcaagcatagaaccatccggctgcaagtgtacataatatccacaatgatcggacttctttcctttggcattgatataacctccgaaatgtattttataaggtgttttatccgcagagaagcgggtatcccggtaaatacgataagtacagtctttgggctgaatcccccggatagtttcatcaaacagggaaatacgggcaatcactgttgccaagaagttgtcgaactcggcacgggctgtttcatattctgccttatgctcattaaaccactcacgattattattcgcggaaagatcttttaaaaactgaaagataacgggtatgttcatctttatcattttctattattactctacaaacgtacaaattttatttcatataaactacaaaagggggtaaaaggacataaaaaaagcatcggcctggtaaaaccgatgctctaacacatttatcaaaaaaacagactcttctgtctctgacgtactttagctttcacaagtgaagtacaatctctttaattaatcttatatctaatactatgaaaaacacataaatataacagtacaaaagagacttttgttcagcagttctctgtatatttcagttaattatagtttatagaattaaatgtttctcatttataggcaatataatgcgtttccagtcaatcattgcgttgaataacatgatatgggaatagtctttcagacatatttgcggaatgtctttctcaacaatgagctgcctgtccagaaattcgcttcgtttcgtcccacggagtaacggatgagccggtgtgaaccaggtatgtccgtcatagagagtaacattagctatagaggtatctgtcagatagccatttctcacaattaaaatatcatccgccattcctctttgagcgtacaaggcattcagttcttcccgatacgcacttttataagtataatcaatggtatcagacacaaccaaatgcaaagaagatacctgtcgcatctgatagggcgcatacgtaacttcttccacttcttttccatatacaatccggcatttatgaattccatttaaagttggcggagatataaattcccgtaaatccagcggagtgctgtctttccaaaaagctgcacgggttttattaaagcgttctgtgtgataatcaagattataaatctgtccatcctctatccggatagtctcaataaatgggtacatatactttttgtttcatttcattatactcgctttccacatcactctggcaggtgatcccacctccacttttaaaatacatcttctctccttcctgttctacaaatcgtatcataacggcactatctaaatcaatgccatcagaatatcccataactcccgtataaaatcctctgtcgtaggtttcagcttcctgaataatctgcatcgtttttctctttggagcaccggtaatagaaccggctggtaatagcctgaaaataatatctcccaaatgctcctgataattttcaggcaatataccctgaatttcagaactcgtctggaaaatgactccccgattagtctgtaacctgtccatataccgataccgggaaactgacacccggttggcaaccatacttaaatcattacgaatcagatctacaatggtagcatgttcggcagtctctttcggatcattcatcaataattgagcagcagagggaattgaagcatcaatggttcccttcatcggatatgagctaatttttccttgatgaattctaacaaatatttcaggagagaaaaccgtaaaacgatctttaatccatagcttataaatcgcttttgaatgaaaataaatatctttcagagtgagattggtttctaccggagtgcgacacgtcaaattcgtaaggaaactatttcctgccaggatgttccgtcgcacgatattaaacgaacgttgataagaagagaaagattctgcgaaaggctgccaatgtagtgaaggcactgtttttgcggagtaagtagctatatcatcttcagccgatataatctgattggtaaatccattcaaattatacaaaacttcagcggaatcaacagcggcaacctcctctatataagatacatcttgtagataatttataatgaaaatgaaaggacggtggagttgtcccaactggttcattcgtttaatagcctgttccttattatataagtgcatataaaatacttctacgtttagggaaggcaaatgtacacaaaaagtatagattagaaaaagatagcaataaaaaagggttgtccgacgtgtcatatcggcaaccctttatcatttataaaattggtcaaattacttcataacagctttcacttgaggaagcatcttcttcacattttcattttccggagagatcttagcagcttcttccagatagtctaatgcttctttaaatctaccatcagctttttctttttctgcagcatatttatctgcatcagaatttgccaaaggagcagctttcttcaggatattagcgccatcattatagcacagaactcctaaactgtacaatgcatttgttttatattgcttgtgatccaaaggaattactttcttaaaacaatcttcagcttcttctgcttttcctgctttctgtgctgcaagtcctgcttttagataatgaagaccataattcttcaccattgtcttattcttaggatcgactttcagcccttcttctaatgtagctacatattcagcagtcttcttttgtgcatctaaagccaaagctttacgagcatacgcatttcctatattaaattttttctgaatagcaatatcgaaaaaggtcacggcttccgcatactttttcacttcgtctgctgctataccacaatagtaagctgttgcagaatcctgattattagtctgtttcagatattcgctgaacttcgcatacgctactggataatttttaacattaaatgcatcatttccttcttttttcaattgctctggggcggtttgtgcaaaaacattagtcactacaatacaaaatgcaaataaaaaaatcaatttcttcataactttatgtgttttttagttgtttatcgttcaaaagtagaagttataatagaaaaacacaaccgcattttatttttttgacctttttgaaacctatataacgttcgttattcttcgtaaaaatgacgttttcctattcattcctccccaatcatataagtaaacaaaatatttctcttttataaattactgattcatagccataaagaaaaatatgaataaaaaagtgccggaaagtttttgagttttcataaaaagcactacctttgcatccgcaaataaggctggttccgtagctcagctggatagagcaacgcccttctaaggcgtgggtcctgcgttcgaatcgcagcggaatcactattaacatccggtaacagttaaatgttatcggatttttcttttaaatagctgatattaaacgttttactttcgccccgtttaacttttaataacctgcctgtgtaggcatatttgtaggcatatcccctctacaggcataaaataggcatataaaaatgacggcaataagagttgtaagacaaggcaaaaaaggcaaaaccgaccggctccccctgtatgtggaattttatatcaaccgcgagaaaataagaatcgcggtaaggttaagtgtcacctctaaagaatgggatgagcaaaacgaagtgataaaaggccgggacaaagaaagtaaggataaaaatttaatcatctccaatatccgttcacgagtaagcgatatatttgtccgtgcccgtcttaaaaatgagacgctgacaaaagaaagtttcttccgccagtataacaatccctccgattttggtaccttctttgattttgcacgggtttacctcaaacaaattagcaaaactatttctttcggtacctggaaacatcacgtttctatcatcaagaaactggaaacattcgcacccggccttgtattttcagagattacccacgaatttctcctgtctttctttgcatatcttcgcaaaataggtaacatggattctacggcatggcgtaacatggctactatcaaaatatatgtaggtgccgccatacgtggcggttatatggaccatgacccgttcgcggccataaagatacgtcgccccaaaagtgaagttatatacctgacggaagaagaactcctccgcctgaccgctttgtaccggtccggccgcttggaagaatgtacccagaacgtactccgtttttttctgtttctttgttttacttctttgcatataggcgatgcaaaagcattgcagataaaccagttcatagggaatgaactacactacacacgaggcaagaccaaaataccggtaactgtacctttatcggacccggcacgttatatctatgaatattatcgggccggacgtacaaaaggcaacctgtttatgaaccttcccacggatcaggatataaaccgggtactgaaaactatagccggtaaagtaggaataacaaaggatatcagttcaaaaaccggccggcatacattcgctaccctgtattataagaaaacacatgatatcgtaacactatcccaccttttgggacatagttctataactatgacaatggtttacgcacatgttctggaggatgaacgcgaagtgggaatacacgcctttgatgatatgttataaccccaaaagtgagggggaaacgtgtttcctgcttcccccttcacttttctactccaacgtataaacgctccagtctatcgcctttttaagtgcccagccttccttttgtgtctcctgtatatgtttcacggcaccggtgtaaaactcttgtagttgctgcatacttgcaaactcgtaaaacgtcgggttgtcttcttccccgagcttgaaagtaacaggaaggttttccccgcctgtctgcaaggcaagatcgtacgccgtcttataattcatctggttctccatggaaagccagactttcaggccgttccatacgtacccgctttcgatcgtgtcggttatcttccggttataccattcattaataaccgccttgatttctgccagtgcgggtagatgatcgaacgtctcttccatgtaactacgttgcactccttcgggtgtctctgtttcctggtaatcccacgtaatacgccagattccccggcggcggttggtacatcttaccggttccgccttgctgtctgcataaattcgtatcatttcaagtaaaatgtataattatcaatcctttttcacttacttcaccttcgcaatgtgcttcaaaaggcagttctccgtcttttgccgctgattcacaaatgaaaagtgtttcctccaggctggtaaaatactttctctccttgccgtcgagttccagctttataacagtccggtttccgtttttcgtcggcacatccttttcataatcaagtacgatcacatctttgttcatcagttcgggcgacttgatccttgtcccggtaaatcgtttccgtccgtctttaggcttgtacttgtagcccaaatcttttaattttttcattttctttcctgttagtttataaaataagttcttgcaatcggcatgtttcgtaagcccgtaaaatgaagcggttaactcctgcctacgtttcttgcttttaatcttgtgcatcttgcgggcgaacttttgtttgttacgcttccttaaccgtacatgatccgggcgggttacatatcccagaaagtcgataccttcggtgatcgggaaaacggtatcattgcttttaatctccaggcgagctttccgggtctgttcatgaatgatatccctaaccttccaaaggtatttcttactaccggaaagcaccagaccatcgtcacaataccggtaataatgtgctaccgcctcctgatcctttaaccggtgatccaggtaaatggatagaagcaaattacaaagcccctgtgatgatcttagcccgatacttacgcctttaggcatcatgcggatgcactcttccaggattccgatcaatattttatccttgaacatccttttcactgcatccagcaaaacgtcctggtctacgctctcatagaatttcgttatatcgaactggtacccgaacagggttccttcgggatcatcctttatatctttaacgatatactgtaaaaggtcatgcgttcccctgtttttaatggatgcggaagtagtccggataaaacgtactttcaaatgccggtccaccacattcataacagcgttaagaacgatcctgtcctccagggaaaccgcttgtacgatccttaccttcggcccgtcgtctacggtcatttcccgatatcctccgagcttgaaccgcccgctcctgatccgtttcctgatcctctctactgccttcgggacatccgccagtattctacgcccggcaaagctgcgctttcgtcttcttttacgcaataccgtttttatggcgtcctctatattggagtcctcgacaatctcttctataatattatcttctctccacatgataataaattagccttcaattccccgggccgggcttcttcgaaaaaagttcctaccaaaccccattgccctgcgctttatttttcccctttccagccgtaaacggctgctgttggcgaggctcattcctcttggctccacgccggggacacgtccccactgttgtacgccaatttttaaggcttatgcgctttttctttatcctaattgtttgcaagccgaacgccgatgttcgcattcgtgttcgatgaatcgttattcgcgttcgcatacgaaacaccgcctaacgcgttcgcgttgttgttcgaccgatacaccacacgagtgtatatgaggaaatccgcctttgtactttcaggaagcaccggcacccgtcttacttccggacgcctgcgctacccgcacaacgttttacgttgttttttttatcttaatcagcctgatttatggctttaaaggccgcgacgctgcccgcccagcgtattatgcccctgaaggcaagccgaacgccgatgctcgcatgcgtgaacgatgaatcgtaattcgcgtacgcatacgaaacaccgcccaacgcgtacgcgtagctgctcgaccgacacaccacacgagaaagcccggtacccacatagaacctgtcgaaccaatgtgaagaagtggaaccgccttctttggctgcaatcaaatccatataccggccccaaaccatgtgggtaggataaatatccgcattataaacagtaattccctgtacaacgcgttccgttccgtccggcatggtaataaaccaccttccgtccgctgccgtcttgtttaccgtgacatactgcaaccattccgccttatttccctggaaattttcatatcccagtacattgacggactgataatttacaccgtcccggtaagcaccttccgcctgtggattggaaccgcctttttccttataataagaaaccgtatcacgcatccccagtgcatttgtaaggcccgtcactttttggtaattacttgttccatatccgcaaactccctgcgaatcggtattaccgtatttaaagaaatgcagattacccacatccttgtgcatctcccagtcgaacagctggaaacctttgcccctgttctgggcgtatttgattgcctggctctgtgaaatggttcctacacttgaaacaccactgacagaacgcaatacatcatcaatcaagtaagcttcataagcaccgcccaggcattccgtatgctctacccagtccggctcgatcgcttccacactttccgacgttgtgagtaaaacgaaatcgaaggccgccgaattaaggaaagtaaaggccaggaaagtagcccctgcgggaacagcacaaaacaggtacataccattaataaaaccgttcgcgtttgaaacgcttacccgacttactattttgcccgtatcatctataaatgcagccccgtaaagagtggaagccagaccggggaaacggacctgcttgtaatcccgcacgtccaccagggcgaacgatccggattcgtattcattcttcgcctcttcaagggtcgtgtaatccgtattcttacgaatcccgatcccttccgttacctccagctcttcgcgggtaagttttacactggtgtaccctgccgctgccggcgcatcctcattgcttgaaataaaaccgtacagacattggttcagcacgtccgttactcccttgtaccagtaatgaggctcatatacgtaaacttcgccttccgatccggttaatactgcatccgtggcgttctccacgctgtcactgtcggcgtatttgttccggctctcatcatgaagcggataacaggtcatttcaccctccgccgtctttttggccagaacgcaatgtcttttcgccaacacctccaggatatgggaagacggggtaaattccgtattatagtcatatccggtagagttatccaggtttgtaatcttttccccgtcctctaccgtctggtctatttttatgcagacaaactgcggctgaatgatattcagttccgggaagtgcgcacaggtggcggcgtactcttcgtccgacatggactgggtcagccggtacgtacccaccaggcggcacgtctgcacgtttcccccgtcttcatcaacaccgcccattgtcataagcccgcgaagcaaacttccgtccccgtccatatctataccggtaattcgtagatagctggtcgcgctgcattgctgtaacaacgtgttccagtcgatcaggctacagttatcaatcacaaggcgcgtgatatttgccgtgctttccagctgcagccctgcattggtcagtttgttcaggtaccggagctccagcgtctgcaaagttgcgggaaggacgcaaacggccagaggcgcaccgccggcgaatgtcacaccggtaagggatgtatcaccggccaggaaggtttcaagtttggtgttgcttgaaaggtccataccggtaaaggaagaggatttaagcccggatatgtcgagttgtcgaaggttacggcaattacccaccagaagggcgttaagtgtcatctgtccggcctcacagctaacattcagttcacgcaaggccgtacagttgttcaggttcaacgtgccgacaatggcgtgggctacatccgtcagatcaagcccgcgaatacggcttgcaccgtagaaatattgcggatcgtttactattaaatccgtgtccattgtcagttccaccacagccccggccgtttctgcaagtaccgcgctttggtgcggtgttccggacgtgtaaccgtacccgtaataataccgttcggaggccgtaatccgaattttccggttatcgctgccgaacttatacccgaaataagccgcgaagctgtcacgacgataagtaccggccacgtattgactatccagaagggcgaaacggttctgaatggtataagtacggtgcgcgtaacggcttccctgcaaggcatacagataattataataactggttccgctgccggttgtcaccccttcggtaagcggaaggatatatttatattccgaatccttgttataaatccgctcgcaccagttgcccatttgttcctcgttaaatacttgcaggacatattcaaggctcatattgctacgcaaggtttccgccacttcacgcaatttgtccggacaagaccgtaccagttcccataaaacggaatcatggccggcaaaagcataactaccgatactatcgtcaaaactttcgtgggtaatggtatattcgtatttcagtaccgaatcattacgcacaccgaacagcgtgtccatatcgtaaggaaggaaataccagatcagagagtcccaagtcgccagcatcatgttttttgcccggttatccacagccataaagtaatcggtaatcagataccatgcaaacgggctgtcattaccgaaatactggttatattccgccaggaacttggcgggatcatccttacatgaatcgatccagttccaaagccttgtaactgccgccttgtcgtcctcgtgtgcatccgcccaggtagtgtccgccttgaaacgaaattccagcgcatcatcaaaagaagacatgtcggtagtcccgaacagacaaagggcctcggagttgttcaggaactccagacagatacatttgttacgctgcccgttcagggccgcttcgtcgttgaatccttcaattccttcaaaaccgtaaatgatcgcactttccgacttctcattattgaaattgtattttcccagataagtattcgcaccggtgccgtcgttgtcataaaacaggtccatagggaaaccgtccacgcctatacgtacgtcatattcccccttatatgcagcctgcggcggtgtcagccacccgcacctcttccaaacgtcgttcacaatacgcaccgcaccggtattatgtgtaccggaagaatcggaaaagtccgctttcaaacagaatatactgatcggccgtgctcccggtttgaaactgtattcaagggacggcacatccacgccgttaacttccagcgtggtaccgtatttttccaggcgcaagaaataaagacggtaattcttacgcggataagtggtggatgatgtaccctgtattcttagaccgacattccttgctacaaaatcgtactccttaccctgcgggctataaaaatagatatcgaccggtacctcgaatttcttgttattggtggcgttgacaaggttcacatcgccgacaattcgcataaccgcctttccctgggcgcgtaacttgtctatgtcgatatccgtaccgttgtcccccgtaacatcattcttttcaaataacaggaccatttcgtccgacgtagtccggtctaccatgtaattgttcaattcttcatcatccgtaagcgcacggttataaatacggaaattcctgatctccacatccgccgtatcactgaacaaacggatgttcaccggttccgcctgcagtaatccttcggtagccccatactgcaccgctccgcaacggattccgtttacataaagttccagcaaccgcttaccggccttggccccgacaataaaggccattttcaggttcatatcacttgcaaacttcgtacttacttccgtaccgccggaaacacgcataagggcctgctccgttgtcatctggaaaccgatatcgccggccatacagtccagtatcaccccctgccggtccgttaccgacgaacaaagaatttccatttcataggtagccccggtagtggttgcatccgtggagaacggccggtacccgatttcaatcttcgcgcctcccgtaagtttcagggcgtcacccgtccagccgttgctgctccagtcgaaaccagaaaatgtcgtatgtatgtcgccataatcccaggctcccggatcggattcgctgttgctccgcccggctgccgaaagtttcagtacaagcccggcggtagtttcctgcaagtcgatcccgctttccgttacgtcgatataaaacgggtattccgtggcccccgtcttaaatttcatagtgatctcgccctgctccgtaaaacggttggtatatgtctgcgtagtacgggccacactgacagactgcgttttcaccccgtcccggtaaacgtccatttgagccggcgttgcgtcaggatcataagccacaaagtcaaattttacctgttcgtactgccccgcttccaagcgcggaacaagatggtcctccgtaaaaatacggccgtccggaaaactcatcatcgtgccgatgaacggtgccgatcctccggatttcagaatatcaatatagatactttcagactttaacacgagatcggcggaagcctccatttcggcaaccatttgaacggtattccggccggtcacaagcgaagagggggacaaactgaaactgccgtttgtcgttcccgatcttgtaatggtgtgcgcgttctgttgccggccgttcagataaagcgtgacgacctttgttccggaaccgctcacggcataagggatattaatcgtgtcggccagggtataaccgcctgcggctatggccccggccagattgtaagagctggtaagggaaaggctgacaaccttcacggatgtaaacgcctgtcgggtctgtttcttgccggtagtcggatcggttgtggttgccactacgtaaatatcggtattcccaacaagcaagtaacttgaaaggtccagttcgtaactgcctttggaaacatcgctgaccgtctgggaatacatggtagttgttccacgcctgatcgtaacggtgatatccgccttttgcccggtagattcccccttttcatcccccgtggtgtattggtgatcgtatgtataagtaagacgggcgtttccgccttccttgattatggcgttatctacagccgcattcaagacaattttagtagccaccgtttcgccggaacctccaccggaaccggccgggatatccacggcggtaatttccgcgccgcttttgttctggaaagacagacggacggatgtttcatcctcgcttacctccgcatttacgttaaacagcgtggaagcgtccacctcgttaaaacgggcggttactaccttgttttctaccggattggtggaatcggtggacaaagtctcgtccacttccaggatatccacgtttacattcacattaccggccgcgtccggcgtctgcttctcgccgtttaccgttacgctctttaccgttcctttgccgccgaactcttcccagctcgcctcctggtcccaggcatccagggcggttccggtaaactggtacgtctcccatttgccgagcgatgtttcaaaggtgatgacacgcccccggccgcgccacttctccggtaccgcggcaatggcggaagccagggtatagaaaccttccgtaagcggcacactgccggttacattataggtattcccgccgcctgaaccgccgctgccgaaatcctcccacttttcgacattctcaaaatccgtgtccggattgcctttaaattgtttcgtcacccagccgtcggcagtgaggaaagaaaggatcacgccgtttttccggacatcgtcaatcttccccgccgttttcaatgctgcaaacacccccgacagatcactataaacgctgccggcgttcaagaggttgtttacattggtaaaggtggaagacagacgcccggcagtttcctgcaactcctgtttcatttcgtcacggtctgcctgcaacgtgcttatgtcctcggaacaactgctaatatcctgggacagacttttcagctttccccaaagggaaccgtcttcactctgtgaaccgtcttcgctgccgatacgggcgttgatatcggccagcaatgcggccagcgtatcactgtctttaagcccgtccagaaaagcaagaatttcgttaaagttgtcgattgcctgcgaagcgttgttgccgacaagccggtcgatacgtagagaaacggcgtcgatagccttctgcaaggctgcatcggcggcaatgcgggcggcttcctccgcctcgatttccttaccctgggaaaccagtttcaggtgttcgttcaagaagccaagaaccgccgccaccatttggttggtaacgctttccgcgtcctccgcggtttcaatgactataataagatcatcgatatactcctgtgttgccatatagatacattaattaaattgtttactgaactctttggaatgaacccgcggtttccggtagccgctttccgtgatttctcccgtccagttggactccttctcggcaaacgtgagctttaacgtcacgttctgcggcgcgtccggacggacacggtaagaaaactcttccgccgaaggaattaccttgatctcttcccggccgtaacctgccaggtagacatcatcggaggaaagcaggtcaagaagaaagcgtatttcctgcgggcgtttgaatcccgtcttaaccgttacggcttcctgtatctccgtacgtatgcgatccgaataataatcatcggtaatttcatcgtaacgccggaaaacagcgtcttcgtcttcatccatgccgggagttacgctcgcctcgccttccagggaaaacacctcgtaaaccccgtaactgttcaggaaccggagccggtaacgctcgcggaccgtcgggctttgctcgatcccgatccggagagcgaacgtttcaccgctatacacgtcaaaaaggttggccagtaccccgtaatcggtaaagaatttaagtcttacggcctccaggttcaaggcgtagaaattccctgccgtgcctggtactgcaaggctttgtccggtaagaagttccgttattttcagctcgtgctccggatagatgaaacagagcgggtaaagttccgtctcgcgcatcgttatacgccagtcattgctccgggtggtaaagaagaaattgcaggattcattcaagaacttcaaagaaaagatgttattaccttcttcatgcaatttcttaaaagcccgtttggatataccgccacgccaggcagtaacaaccaaagtggccgtttcttcctcctcattttgaagggtgatcgtgacgaccgccttgttataccgtttatcggaaaggcttatcaacatctcggaactgtccgttaacgggggaatatcaacaaaaagcgtttccaggacctccgcgatattcaccttgaaacttccattaccgttaccggtaaatatggaacgcataaattcaaagttcacgaaatacattatattgtaagtcgccatagaagtagtttctaccgaaagataaacagggtttccggtaaaggcgttttccgtcggatcaatgtttgctgtcaaactcataattcaaaggtgttaacgatgaatattccgttaaactcactcttattttcaagtccggaaaggaaacgatcacgctgatccgtgggagacgtcaggaacttgtaaaagtccgagagccgccccgcatggttttccctccaaagcttataaagctccgtcacctgtgaagatgacggggcaaggatgatattattctgcttttccatgctgcaaaagttgggtttatcaaaggaagaataaaggacgggatcagctaagcaccctcgatgcgacaaaccttacctggtattcgacttcttccgtttcgtaacaaaaatagttggccgcgccggaacgctcgtttacctcgatttcaacctctatcttacatttgtaagttttttctatgatgttatcctgtgcggtgggcggattttttaatatatcctcatccgttgacggcgtaacatacccgtcatatatcgtattcgatacacggcaaccgtacacagcatacatccagtgataacggtaataatcttcccaatattccacccttccggcctgtacactctgcaaattggaagaatatacgacccacacgtaggaagcaccgccccacacgggaatgccctgttcattatccagattatagggaccgatcagacgcagggaacgcaacgtaatgtttaccggtaccagtttacccgcaggaagcgaataggaaaggccgtccagaagcatgtactgcccccgcagggctaccggggtcaagacatccattttcataagctggtgaaccggtaaaagggtgtttgtgtccacctggttaaaagagtgccttaatacggcgtcatacttctgccagaacttggcaaacagaccgtcttcaaactggaataaaagcgatatcgtatgtttgctgccgtcttttaacgtaatttctccgccgtccggagcgtatggtaaaatagaaccgaaggaataatccgtactttccgtaacggcctttgtaaaagcgaaagcgaaggaaagcggcgtctcctccttttccgaatcctcttcatcatcggaagaggttttcaggtaggtataacggtgcacatacccggccaggtaatacggggaaagaaggccgttcggggcaaaatccataaacacgcattcatcatcgctcgccagctcctcgtcctctacgttttccgtcttccggtcccagttaaagaaactggatgatgataacgtatgcttcttgttgcccgaatcccatttgtaccagttgccggtggtcttctcgtagttcagccacacggaggcctgggaaggatcgaaacggcttacacggataaccattttttcgttccccttgatatagtcctcgtaccgttccaccgaaggcgcggcaccggtaaaagacgttttggccgataactttatctgacgggccgtttcataattgataaggggttccgccgtcagattccgggacagatcaacggcaggttcatcttccattatatcccggatcagtcttaaagtggccgttttcgtatcggaagagacattataaaccagtccgaaacgtacatacagcgcgtttaaaaagtcctcaatcgtacaatccggcattaaatcggcataattgaggatacccgtcacgcaacagtcggcggcattgttcaggattaccaggctggaaagttccttgtccgtcttaaaaggattttcggttatagtataaccaaattctgaaaatataaagtccaggacacggtgcacgtataagaagggggccacgccgtacccttccggtaaactcgtttcggtcggggtatcatttatcagtagtgtttccgtccttgcctgatagcataaggcatattcaccgtttgaatccaaagtgatacggtttatgtattgcgggtaatacgtgccgtccttggaatcatttttgactactatttgaaatatggcaaaatcttcatgggaatccgtgaagaaccagtttatagaggacataagaccgctaacggtaccgccgcttatgctgggtaatgtgatcgagttcagtttctttgctttccaggcgctgtaggcttccgaattgtcaaaaccgatatttaaagtaattccttccgtcctgccggcggaaacgatatttatctttccggtacgtttatacaccccgtccaataccgtacatgtctgatcttcattcatcggttttacacccatgtcgagccggtgggcaaaaccggttatccctgcattgttggcagtgacgggaaccgtgaccggtacggtttgtgatccccggtcgttcatgacgggggatttctcgtcgatctgtacggtaaagtcaccccctaagtccagataacctttgttcgtcttaatctttagcataatgattacttattttccgcgtgtaaaggtgtcgcgggcgttatctatagtttctttggccttctccaaatcctggtaaacgatataggcctttatcaatttgatagcctcacaggaggcgcgaagctcctttgccgcttccaggaactcccggtaggaagaatcacctgcaggggaagtcacgtaaccgccttcataatattcacccggattctgtggtaacgggttggcactggtacgctgccgcctgatcgcttcgatagtgctaacggcgtcgatcactttaggattattcatttccggctgtggtaccacatattcccccttatgaaccacgccggccacttcataacgtccgccgggaccggtgtaaccaccttcataatacccaccaccggaagaaccggaaacaacacgttcagccgtggcggtcttgctgccggtggtgtttttcaaggacatgtttttaatcctgtcccgttctgccttggccgatgcaagctgggccacaccggtagccgcaagcattactgcagcaacggttccggcaatcggcccgaggtccgcgtacgccttcataatcgaaacggccgtatctgctatgatctgggaacacttgatagcaaagtttacatccgcgtacttcttttgaatctccagtttcttattttccttctcttcttccagggcggcagtatcttcaccgttgttctcggcttcctgtatgagaacatcgtattttgcttccacctggtcgatttcggcttgttgaatggcttccaccatggaagaggaaagaccggaataatagtcaaagtattttttagcgttattcatctgcatttgcagctttttacgctggtatgtcttttcatctattaattcctgatcgtgcagattctttaacagggccagttcattctggtattcctgtgcccatgatacgccgatctgggattgaatctggtataaactattctggtattcaaattcaagctggctaatttcctgctgtttctgtttctccaaaccaacggtagaaattcccgcctgcctcgctatctcaattatagcattataagtcgtttctacatcctgaacctgcttccggtgtgcttcctgcataccggttattcctaccggaacggaagttatttcacgtactttttgggcaatggccgcccgatcacgcaataacttcatttcagactcacgcacggcgtcggccgcttccgtcgctgtttctatacgtttctgtttgccggtaatttccaaagcggcaatatcattctggtaagtacggtttatctccagaagttctgcggcgtgctccgcttcaacttccagcatataggcgtcggcggcttcctgcgttattctctggtttaataccgctttttccatggtgtccttctggacgttgtaataggcagtttcgatctttaaccgttcatcccgtttctcctgtgccagttttatacgggcgtcctcctgcttgccggtttccgtaaaaatggccgtctgcgcttccgtttcgagcttgtggatttcatcgagtaacttcttcttttgggccggcgtttttgcttccagcttctggagggcgtcaatacgttcccggtaatagcgaaggttttccgccgtcccttcaagaatatactgggcttccgtcttattttccttttcccggttctctttgattagaagcatacgtttttcgtgctcgatctccagaggctttaatgtggcggccgtttccgtatttttgtactcccctgcttccactttctttttgaccttccccagttcgtttaaacgttttatttcggcgtcgatacgttctatttccttgtttttcttggcgatattcgcttcgctgtcttccgcccattgctcctgaacctttttcttttcggcctccagtttctttataagggatgtttcagtatttatattttctttattggtcccggttaatgaagtggccgtcgcctctgtttttaagatatcattattgatctgggcgattgctgattctataccggccaaatccttctgtgtcgtctgtagggctttcaactggttagcctctttttccgtaccaaataaacggcttattttagcggtaagactgttccggttatatcctgacaatgtattttgctggcgggtgtcccagtaagcgtcgctttgctctgattcctggctttcaagattcctttttttcttgtacaattcttccagttcctcctggtaagctttcaacttgatttgtttttccaaggaaactaaatattgatctatagcctccttgttgttgtttatgagcctgccttcttcattcaattccgcattataatccggtatcagttcttttaattcagcgagcctttgtttacgggtgtagttggaaaggttctcgtcattgatagcagctacaagagtttttatttttgcttcctggctggcatattcttcattcactttctttacgacttcctggtgggccttcatcgccgccgaagcctgttccgtcttctttgcaagctggtagatagcaacaccggctgccacgagtaacgcgagcagggccgtatatggattcttcaaaagttcgatcctcattaaccgaagggcggcggtacatcttttaatattcaggtgcagcaatgcctgggccgccgcataagccagagtagccgcccggctgatataaagctgtacggcgtgcgctttctctgcaacgaccgaagcaagggtcgccgttttaaaacgggcgtgccacatggtagcgattttcagtcctccatagtaggaaaccaaataagcggtaacggtataagtgacaacaccccatttattaaacatgtcgatcataccacccacaccttccaccataagcgtaacaaggtctattaaatcccggagaataccctttgattcatagaaacgtaaaactaccccttcaatagttgaacttagccggtttaatgcaccctgaacgttatcacccatttcttcggacatagcattaaaggcgtcttccgcacctgttaccgcatcgcaaagtgccagcacggtatcggtaccgttaaggaaagtgttaaacgctgcaacggaacgtttatcggtcagttcaagggccttgttcaagtctattccttcgctgtttagttttttaagtccctttaccagatcatccaggttgttaaccggaccgccaagagcaagcgcgagtttgccgctactgtcagccaggttaagcaaaatattacgtgttgccgtcgctgccgatgaagcgtcgaaaccgctgtttgccaaagctcccaaaagggcggtcgtttcctcgattgtgaatccgaaagaattagcaaccgggccgacggtagacattgcactattcaggtattcaaaattcagggccgaagacgttgtacctattgccatagtagaaagtgcccgttccgtatcttccgcatcaaggttgaaaatacgcaatgttgcaccggcaagcgtagcagccgaggcaagatcagtgtccacagccttagcgaatttcagcacggaaggcgtcatcgctttaatatcctctttaaaaaatcccagcttggcaagctctatctgaagttccgttacctgtgcggccgtataagaagtagtagcacccagccggcgcgcttcatctgttaaatccttgatactctttttcgtggttcccagaatagcggccaaagtactgtttttcttctcgaactctataatagtactgatcgcatcccttagcccgccgacaatctgtccggttatcattgcgccgatagtgacaaacacaccggccagaaccgtttttatcttattcagggaaagaagggaaccgccgaaaccttccgcctttttcgtggcctgcccgtatgctttctcaacttctttcagttccttctccagggcggcatatttttccggctgcaaggatttcaccgtatcgcgaagctctttccgcaaggcgtttgccttccttgccagctggttggcactcatggtggttttatccagccgtttctcacattcggcaatcttcttgttattctcgccgagcgtcttattattttctttcagttgctcatcaagccttttccactgtttaccaccagctttccctgtggcgattaaatcggtcatagccttttttatctccttattgctatcccggagctccttgttcttttctgaaagattatgtatttccttctgcgcatcggaggcgttcagggttaacacccattcgatatagtcaggttttaattttgccataagagtaaattttataaggcaaaattatcctggtgtaaagtggcggaaaaggacacaaaaaaagcccgtagaaccattctacaggcttattatactaagaagaaagtattttatctcttaaaggtaaaatccgaaggatcaaaacattctttatccttaattgttgcccgatctatcatccagcaaatgtaccaggttagaggaaccgatataagaggcgtcacgataaaggaaagaaaggcaaaagcaagccacccggataaagtagccggtttatgcttacatcctacgaaaaaaaatattaccaggaaaaagccgatcaaaaataaaatatcttcgtatgtcatacaatcatcgttagttctttaccgatatctttaatagtatttactattagggcctcccgttcttgtgagggcttttttattccacttatatattgagacataaggctttgacttattcccatacgtcgagccaccgcagaagcatttagttccgggtgagaaataaaaatccgatataagaaagtttcttccttcttatcttgaatagctaaacaatcattcatagggtctaaaaatatgcagctataccaatttcatataaaaactccggtgcaaggtcggcaccattggcccattcaatagtagcacgggttaaaccatattgaacaaatttttccttatccaataactccccgaaaacctcacctgtaagataaggttccaaatttacgatctttttactcccgtcgctgaaagtaacaagaagctcgtaattcctaatataatccacatctataactcgtaacataagcgtttattttaatggttcaattttatctattttttcccctttttgggccttttcccaaagagaaagtatttctgcctcgtgcaagttaatccactcatttacttttgcaataactttagctggagcctgaccgtctacaatccgatccaatacgctaatagaacattcataatcaccataagtaaccttaattccgcaacactattataaattaaactttttaagtacctgagcaacaaaaagttgctcaggattttgccatgtcagaattttcacttatcttagtgttgcaaaaaaaacaagagaatccgacgatagacatggcgaagatacaaattaaatctgagagactcactccttttgggggattattttcaatcatggagcaatttgactccacattatcatctgtaatcgactcaaccctcggtctaaggtgtagatcgttcggttatcagtacagcgaaatcatccgttctctcatgagtatctacttctgtagcggttcatgtattgaggatgtcactactcatttgatgaaccacctctcgcttcatccgacacttcgcacttgtagctctgatactatcctcagggcgataaaggagttgacgcaagaaaacatttcatacacatcagatatgggcaagacctacgatttcaatacggctgacactctcaatactttattgctcaattgtatatttgcatctggccaactgaaagagggtgagatgtatgatgttgatttcgaccatcagttcatagagacagagaagtatgatgcaaagcctacatacaagaagttccttggttatcgccctggcgtggcggttattggcgatttgatagtcggtatagagaatagcgatggtaacacaaatgttcgtttccatcagaaggacacgctgaagaggttctttgcgagatttgaacagaatgggctcactatcaatcgcttcagagctgattgtggatcatgttccgaggaaatcgtggaggaaatagaaaaacactgcaagtccttctatatccgtgctaaccgctgcagttcgatctacaatgacacctttgctctcaaaggctggaaaactgaggaaatcaatggcattgagtttgaattgaactctatccttgttgagaagtggaaaggtaaggcatatcgacttgtgattcaaagacagaaacggatggatggtgtgcaggatttttgggaaggagaatacacataccgttgtatcctgactaacgactatgattcttccgtaagagaaattgtcgagttctataaccttcgtggaggaaaggaacgtatcttcgatgatatgaacaatggtttcgggtgggacagattgcccaaatccttcatggcagagaacacagtgttccttcttcttacagcacttatccgtaacttttacaaggccattattcaaagacttgacgtaaagaagttcgggctcaatgcaacaagtcgcataaaagcgtttgtcttcaggtttatctctgtaccagccaagtggatcaggacatcaaggcggtatgtgctgaacatctatacctgtaataatgcttacgcagatgttttccagactgattttggataatgcctacaacttatgggaatgatattgtgtattgcctcaagtcacattgtggggtaaggggatattgtaggcagaagtgggtgcttcaagttcaaattatctgcaaattcagtaatgagaggacgtgtaaacgcaataaggacgttcaagggcttagttgcggatttgaggagtaaaatgaatatgtggcggattatgatctttccaatagaggaatataataataccgaagaatctacaaatttcaggcataaactttgttttattggttactgaaacaaagataggtaataaaatcattacctacaaatatttaggtattaattttattacctattttagcgaactggcaaacatttcttttatcctttcccttacataatcctgatattcatatttaatcttcccgagtgtgtcatgatacagaatcccgtatatctgtcggttataaatctggtaattaccgtgtttcttcatatccaggaagcgggtatataatggaaggttagaatgtgcaattaccccctcgccgtccggaacgaccgaataattcgggttctgtagtgcggccattaatgcaccggatcgcccttggatgatctccccggttccctgtactttcttacgttcacggcctttctggtaaatccgtttggtagcgatatccaattgggcttgaaatatgtcctgtattccacgcccgatccggtcggtaaagaaatccgttttaaaattctcggccattcagttattcattttttgagaatccggaaataatgtgcctttccccggattcatccttaacagtttcatttttcttgtttgaggtatatttatatttccaataggtacatagcacatcatttacacctattgtaataatacctattatgacagttaaccagaaccacgcaaaagcatccattagaatcttgttttaaatgagaaagccaggctccaccctgcaaacgtccggtaaaagccggattccggaagagtggaaaggctggttaaatccagttccttagtgacagggcaaccggtggcagaatcttctatcagcatttgtttgatacgttccataaccggctgtacctcttcgatagtctcataagcccctttccgttggggatcgtacttgctcataaggaaaataacgcataaattattttccctcacattgtcagccgaaaggctggcacccgttcccgacgggatcagaataaagagcaccggacattcttctttagatagtccctgtatcgtcttactcatttcctcgtcaatggtaacgggcagcaccttctttatttcaggaatacgtttttgcacgccttcccagtattcacggtaaacctttatatctatcatattgtcaatccctgataacgtttcgcctcccattcacggcgggtaacaagccccggaagaatcttaccgcccccgtatatccactttttaaactctgccggtatggatgaatcatacgcatctgctctgatcttcttataaagcgttgatttcttgaattttccgatacctacattaaagcaaaagcttactaccgcgtcaaactggtactgtcccaaatgaaggggaagcgcgtttacctggttttctaccgccctgatatccgattcaaagaaagcatcggcctgggcctcggtgataacatcacccggttttacgccgatcgtgtgaccgtaaccgatcgtacatactcccgcggcacatacatacgctttcaggcgtaacccctcgaatttcttgatcttgttttttgttcctgttgtcgttctcatttcttgttacgtttttggtgtaaatactcaaacttacatttatacagataaagcaatacatcccaaaagggtgtatcgtccacctccttcttatttccgaacacgccggaagccgccacctcaaagactatcccggtccagccggttttatcgtccgccttccggtcctcggatgccagcttctggaacaatatccgaaagtcgatagcttcaccaccgatataaaccggtccggaaagaaccatttcccaaacggcggaaaagaagtttaccgcatgaatggcaagcaaggaaggaacggccggcgtcttctccgggtccttgtaccggtaaagctttaacgtgatatcctggaagaattcatttatagccggatcgtctttttctgctgccgcctgtttgctttgctgcaacaaatccaggcaatcacaaaagttaccgaaagtaagaccgttcagcatgtcaccgacaccatgccagcccccgaaatcctgcatcaggttacgaccggttttcagaataggcgtaacgatccgctcgccctccttaccggttgtataagagaaaaagccgtccagcttttccagttgaccgtccagctctcggatgatctcacgccggtacatggtgtaatccgctttcatgcccagaaggaaagaaagccattttacgcggaactgtccggggctgatcgtaccgcggttcatcagtaccgacaatataagaaactgccggtactgctcactgctgacttcatccagacaggaaggaacctccaccgtcttactattatatgtaaacttctccatgtccggacattaaaaggttattcctttggattgtacggtaacacccggtatatagtaatccatcgtttccgactgcgcatccagttccctgatgatatcctgcaatacatccagataagccgccgcgtcctgctccagactgttagcaaccgattgccgggcctctttttccgcccgcaatttatcccgtacggttgtgctctgctgtacctgtacgattccacttggcagaacttccaccggtaaacgttcaacggccttttttatggtgagaagtgcaagcgggcggcgtacatactccagcaatttctccgttaaaacggtatcgccttcaatcagttcattataacggttccgggtgataacaggtattatctgcccgtcctggacttcccggatcataggaataagcaccaagaaaagccggtgacttccgatattataatattcatcgaacgtttccttattctggattagaagccggtttatagcctttttcttaatgccgttcatccagaaatcaaacttttcgcggtccattaactccaccaacgcgtctacggcttcataagccaggttccggatattctcttcatccttgaactcctgtaaggcggtcatacccgtttcattctctccaaggtgtttgccacgtccggccgttccgtgttgtgcgtctaaagtgggaatgacctttaaccaggtaaacattgccaccgcctgctgcatcagccgcaaagtttccgccatgccgtccggttccgtaccgtccgcatgatcttcacggtaatacttatctaccgcgtctatgggttccgttccgatgatagcctgtaaatcccgaatacccagcggtaagataggttcccacttggtaaaatcaagatcattatcgatcaatcccagaacacggactatttcaccggcaccgtcaccgcctttattaaataacttcgtcatttgctcggtctctttttaatgtatatggtttccaattatcaaaatcctttgtgaaattgtttatttcatcgtagaactccttataaaagcgggccagcccggtatctatcgttatacaggtctgctccgtgcgcggattggtgttcacattggccgagctttctattacaaaatcaaaagcgttaccaaaaccggccattactttagcatgattacggaagatgcagacacgtgatccgaaacgttccgccaccttctttaggtataaataaacatccgcgtaggaaccttgaaagatttcacctacataaaaatccgcgtgccctatgtcttttctctccagccatttctccacctccttaacatcggtaattgccatacaccaggtagaaatcagaacatattccaccggttgttgcttcacgatcacacgaagataagtaaggctgtcaacgtccccatgactgatacagtgataagacgcccctttctcaaaatgccagggcaaacactcttccaggtgcagctccgattttatccgccggtcaaaatgaacgtttttcgtccggcgggcctttatatgcttatccggggtgttatcggcccggttctcttccggttgccggtcgcttaccggttcttccggcacatcttccggtttcggtgtaaaaaacagactacgcattttctttcatacggttagagggtgaaacgttctgttccgcttccactatggtacgataaagccctactttcgttgcggtacccggaaagttggcattaatatactgctgtaacggcttacaaaggatcatgtccggaatagccgtttcagaagcgttatacactttcaggctgtataatttctccgatccggaagaaagtttgttttctataatcagatttgaaagtaccggatcaagaccgaagccggaagtggcggcagcgtccgccttattggatatcttaatctgggcgtccacataatcctttatcttcttatccagtggttccaccgtccagccctcaaagttattcgcttccggattccagaatttggtcgtgtgcatgtattttccggcgttctgccttccggtaatgttggaggcgaatttctccatagcttcgtccttgaaatcttccagcatctgggccgtgtatttctcgcccgtacgctcgcaaacctgttttatacgtgcttccgcgcggtcccagtaagactgcggcgattcgatatgcagggaaatggccgaagcgttttcgttataggcgatcaggatagcggccagaccgccggcaagctccagccagtcaagcgcacccaaaaaacgcggtgtactcataaaatccttgcaaaaggaatagatattataatatttcacagaaaccggatatttgaacgggtgggccggatcaaagaccgggtaacggtaagtataggccggatcaggataaggaaagtcgcccacaagtacttcctgcggttcatcctcgccgtcgggaggatataccaggcgggccttctggtagggaatatgttccagccgtaccaaacgcccgggattgcctacacgcggcgcacggttccggacaaactttataaaaaagccctgcatgtgtgttaagtctacgagtgagcggtgaagaaccgtcgtgtaatcccacgactccaggtcggcggttatttccggatcgagtttccaacgccggtaaaaacggttattctcttcgtcgatcgcatcctcatacagccgcgggccttctccccactgtaaaccggctattttacccataataccttcaccggcgtagaatttatccagtaaacgcatgacctcgcccggcatgtcgttattgtcacccatgggaacgataaaggtaccgtttacgctgatctttcgcgaaaagaaagccccccgccggtttaactggatgctggaaggttcccaacctttaccgcggccaccgatagaaaaggagatcaaacccttgtcggtgccggtatctataattccaaagttgccacttcgtcttatttccataatcttaaatcgttattcttttcccgttgaactccattaccagacattcccagcaattcagcggccggcccgttgtggtgtccgtcaggaatagtttatagcttgaattttcgatgctttcatccgtcgcctttttcctcaaacgggcggcagtaagtatcaccatgtcgccgccgtcccgcgtctgacggttccatttccggaacttgatagaaaaggtacccccggaaatggtaatccgcttcatctgttctaccgctacataaaggtttattttttccatagccggcggataaagtttttaatactggcccagttatcatgtaccaagcagaaggatagaaagaaaaacatgaattttaggaacgtccataggctacacccgtttgtagtcttttctttttcctggctttgttgcttaacgtcggatttacgggtaacggctgtttccgtttgactggtagtttccttatgatcccggagggaactgctttgattctttccagttcttttttcagtttttcggttactgaaatcaatttctttaattcttccgaggctgtcgtagtcgatacggatatgcgtactatcttcccggtaaacgtcaagtacgtgctcctcatggctcgaatctctccgcgcaagttcaataactccgtcagtagttgtttgtttttcttctccagttgcttctgtaaccgtttttcgtgtaacagagcgaggagaacgacaaccgtaaaaacaagctgcaaaacaaataagaataagtaggtgtacgattccatgtctcataattgattttagttattagtgtcgaaagtgatagatttacggttcaggcaatttttcaccccgcaaagaaacggtttcatgatatccattacgcgggcgttctgcctgatatccttttccatttcgttacatttctgctggagttcccggtactggctctctacatcgtcgatccgctgtttcaattccttacggtcattcttcatatcctcaatcagttcctggtaaacctcctgtactgacttcatggcgtcagcttccgcctgtttacgggtataccggagagtgaataaccaagtcaggccacccgtgcaaagagctgtaataatcgctgtaattatcgtttccgtcatattagtagagttgaaaatgttacattatagtccggacgatacatacatgcgtcaaataacccgccacgatcccggccaggtctgccagaatatccttccagtcccatttattacagggggacatttcatccccgtattccttacccagtgaagcacccagggcaaagggaacaccataatcacccaacagggcacatatagcgtaattaattccgaaatgcttccatttgtccgttcctattttcataatttgaatcattggttactgcaaaggtgggaagaacggaaacggacgaaaaggacataaaaaagagtgccgggaaccaccccggcacaaacaaaccctaacctgggacttaaacccaacggctgccttttcagccggtatgctaaattgttaatattaaggattagacaacttttcgatgtcttttttcatcatacgtaataattgaatccttcttaacacctcatttgttggtgtactttcatctcctttctctattaggaaatcgattaggtcctcaataacttcgatgtaacaagcggaaaccggttccgtcttagtttgccactgtgtcaaaatctcggcactttcatctgttatatgtgcgccgtttacttctatatctttcataacaaatctttcattaaacgtttttaatcggtgtagtctctaaggtagtgaaatcaattattccggcctgccggtatatcccgagggcgactttcctaaaccgttcgtaattacgtttgtcaatgggcgataactgccacctcttcatgtctttcatcaaatccggtatattattggcactattatacagacagttgtttttaccgtactcgtgatgaagtgatacagactgaaaatcaccggagaaaacaaccaaccgcaaacgttcaagttcaaggaaagcaaactcattgttaaccttctccaccttataggctcttaattcaatggaaggcgcgccgtattcacgtctaacgaaaaataggatatcaggattatttgtattcatttggcacctccttttaagtcttctaatttaatatgtgaaatacttgttatactttccagtaccccgtcgcatacacttttaacccttaatccgcgggaaccgtctttcttgggtaaattcaggtgataatacgggcgattcctccagaatgtaatccggaaaatccagccacgaactttaaaagtagcattgcttattttataatcaatctgtatcagatcacccggtttaaatttactttcttgtagaaacatttcctgtatttcttccttttccttctttatttcctcaatccttttatcattgttttgtaattgagtaagtaacacttgctgatattcagtatatatcattcggcacctcctttcttttctatctggggacgctctgaaaacctatatattcttttaacccgataaatgaaaaaataggctacaggcttgtcacagccgttattatgtgttttagtgtcctgatctatatgaataaacccgctaccggaagatattttcagcggcattgttttagggtatttctcgttcagctcctttacctttgcttccagttcagttttaaaagcatcaaaggaaattttatcagggcaaagcgtgttaccaaactggtttgcaaactctgccatttcagcacattttcgattctgtggtttatattcgttaagctctataaaataagatatcattttcggcctcctttcctcgctttcttggcacgacacacacatataactgcaccaatgacagccggtggatagataaaagtaagacagaaacaagcgatagcagataagtaataagccccagaagttgaacaaacagtacattcatgtttcggttcctgaaaataacgatgttggattgtgtttacgtccgtgctaccagtacggaacgaaggtacatagcttgtaccggattgaaattcatttttcataacggtgttaattttgactattttacatgggaaaggcggttaccatttcccctaattcgtcaaaattaacaccgcaaaccgtccgaagatcgggttataagtttagggaaaggcaaccgccttgtattaaacaagcacttatcgggcataaaaaaagcccgttatttattcgagccaataaccgagactcaccggaccgcaccagcggtgttaactttgacaggggcaaatgtcggcattaaattctgaacaaaaaaaaaaaaacgttaataaaagtttattaggaaagaaagtttctcgactctacgattcgttacttcgtaacaaaaaacgcccacctgattaagggtgagcgttacacactataattaatattctatttgtcttttaaattaattccctcttttatctgttcatcagaagttacctttttacaaagaatatagtgataaacagggtctttgctcattccttgtgtaggtgtaaccggataagccagtattagttcccaacccaatttagccaaatagttaacggcgtctatcattgaattaaaattcatcttttcaccgttttcatctactaaaaaacgagcatttggtgttgcccattttgccttctggccgaaatctacttctatttttacttttgtaccggttatatttccagtacccacgatttcacaataagccttatacggttcttgtgcaatggctgccattgttagtatggccaatacaataactaaaaaaaatcttttcatatcagtaacttaaaattagtgtgtactttagtttgtaccacccgtaagtcctgacggtatatatgcagtgtaattttgacgattgcaaaagtacttaaatatatacatttataaaaaatattaccccaaaatcaatcaaaaatgaaaggcaaccgccccaaaatacacggtaattcacccaaaaatgggcaaaaaatgaaacaaaaacgcataaaaaacgcgctttttcgcgtaaaattttggtctaaatgcagataaacaactgaaaaacagccaaaaaccaaagaaaatttcaaaaactaaaaaaatgacaccttccgaagaccgagccgctcagaagtcggaaagcagttgccctccccctaaaaggtgaaatatgacctctcccggaggggtacccgtaacctggtaacacaaaaaacgccggaaaaccgattttccagcgttacaaggcaattaccttttatgcctgttctctatccattgatccacaaacgagtcggcctgcagcgtccgcttgcctcgtactaaagctatccagccggggcgcatcagtaagtatttgaaagcgtcggagaaattggtggataacatcggtagttttttcggtgccagcttttcggacttcttcaccttgaacactaccttagaattaccccggtatttgatttcagcctttgccttttctacggaactaaccatttctttacagttcatcgcatcaaccagcaagataggcaggttcttgttggtaccgcccataatctcctgcataaagtcgtattccgtatcctgccggataactgcctgtttgcggctctttaggtttacgatccagccggtacggtttccgctaccgtctttttctatggcgtctttgatcttacccgcgtaatcctccttctgtttctcaaagttattacctgcacggtcatagtacaaatccagttctttatattcgtggttctggaagaaagtgaggaactggtcggcgatctcccggaaccagcccggcggtatctcaaaaaagttcttatgtacccggtaataagcaccgtccggctgaccgatcaccaaagaaagcatattaccgaagtccataccaccttcaatcgctttatcatggtgcaggtaccggagctcccgcgagctgtaagcggcttctccggacatggtaccgttataatacttatgtccttcaccaaacaacacatagaaacgtaaatccctgcgaagaccgggacgcatacccaccaccgactttttaaattcgtgaagctccagcgtaccattatacaaccgctttaaataatcaatcgtaagtatctcaacattagcgaatgaagaagcgttaagaaagaacgtttgtccttttctcaacttcaacaaagcccggtcgtaatattcaatatcccgtttcaaacgtttcagtttcaaaggggaaggcttattttttctttcttcttttaatagagaaattaccaggtcattacgcatacttgccgcctgtactattttaatgatccgttccgggtccatttgcttgacataccggaaaaaccagtcgtactcgttttcgtcgatatccggcatatcggtagtaatggttatccccaggaataaatgggaatgtccgtaagtgatcgcatcaccgcgaagaataggcatagcgcggtttactttcatttccttgtcgtacttcgcttcatcataaaacagatgtattacagactttccggcaagcagcgaagggttatccagtgatcccatgaaaataacacatccgttccagaagctgtaaacatgcttgtaatcatccacgataaccgaacatttacgccgccaggattcaggcgggcgggtatcttttacatagtgtaccccttcgatcaggcccataagctgccagcccttctgtacggccggcattatattatcttccaggttactgtaggtattggcaacaaaagcgaacgcaccgccgggcatttcttccacacaacgggcggaacgcctggcttgtataacggtcgatttggccgtaccgcgcccgtcaacagatacaaggatagtagtatcgatccagtccgtcagaacctggattatatggccgtatttgatttccacatcatcggcgttactcaccttcgttatcttccccgaactctttgatatcatacaacatacgttttttcaggtcaaaagctttaatacgcgcgtcctcttttatattatcacgtacaataacaggaatttccgggatcgcgtcgataaactcttccagttccttacggtcgatttcaggaacacccagatccttacggctggtagtataaataaccgtgcttttctgtgaaagcagttcctccggtatttcggcctgttgatccttataacatccgcgaagttccgccgccagtttcagcaggttcttagcctccttcacatttcccataagaaagacggtattcgcccagttttcggccttttccgcatacaagttagcgaaagcctgcgggcgtacgttatcctgcgtataaaagaaattgagactgtcagcgtacacctggcgggccatccagtccgaaaggccgtaaggttccgacttcaaaaggcggatgatgccggcctttgtcaccagcttaccatttatacgcatacgggcacgaaggccccgtaccatttccataaggctgtaatattccctttcatcgggcgcgagggcttccagcgtaccggtagaaagaatcctttgaatctggttgatatccaccttgtcaaagtctattcgtgagggcttaattaaattcgtcgtcatccatttgttcgattaaacgttcaaaagtatgtcttttccgtacggcctccagctgttttatagcttccacgtttccgccttccgccgcttcatggagttttatttcaggcgcggcacgtgctaccagaatcccttcccggatcaggaagttaacggaagttcctaccgtttccgcatcccggacaaaaagcccggcatcctccaaagaaagccccagggaaacggctatgtctttcggcgaataccctaaagaagacaaacgccgtacatcctccttttgctgcgcatccaggtaaatactatccaccaccgttaaatcgttcatacgcatcttttattcgtttctgtgccgtgaaataataaatttcgtcctgttccattaatacaaagttccggccgctttcaatggctgccacggccgtagtaccggaaccgccgaaagtgtccaggatcagatcgccgggctttgtactgtcttcaatcagtttacggatcaacgccaccggtttctgtgtgggatgaaccttttcaccttctaccagtttcgcaccggaagcaaaagaccggatattatctattatgtttgtggcaccgatagaaacaccctttccgcaatgaaacaaaataagctcatgtataaaggcgtaatgattacccgggcccgactgtttgttccagacgatcatgtttgacgcgcctaaatacaagtcaaacaacggataataaaaagcatacccgcgccagtccgtaaaaaagtacacacaagcaccgggtttcttcacccggttaaactccaggaacaaatcccggtaaaagggtttacagatagacaaatctttaaaactgcctttctgcccgttgtgtgtcattcccaggaaataaggcggatcggttattatacaatctacggaattgtccggaacacgtttcaacgcctccaggcaatcctcgttatatatttggtttgtaatcattggaaagttgtttaagccggctttcttctttttctatccggagggttaatgtcttgagctggtgccccagctccgagcggtcgcaagggtgagagaaacggcccaggttctttgtgatccgttgccgtttccctgtcagactggcaataagttcaattactttttttttcgcgcctcaatttcttcctctatggccttctgtgtagtttcccacttttggatcaatgcaagggcactcgctttcttcttctcatcatccccggcctgttccagtttcgccttattctttgaaaggttggcgcgggcgttattcagtgccttttgtatgtcgatatccgaaaggttctcgacgcccttacggacggacaaactttttaccttctcacatttacccagaatctttccgttctcccggtaatattccagttcatcccacatctcgcggttagcgatgaagttttccacaaccgcctgcgcttcctgtgctgtagaaagtgaactgacatcatccggcgtagcttccaggcgggcgaaagcttccttatacttcccgtatgcggtgaacatgtcggaaacaagtattttcagaatgtcgggacaatccggagaattcaggaaggtaaatttctcgcggaaacgtatcattttggttacggtttccggggctgctttgtatcgtttctccgcctcttccagttcctcttccagctcttccacacggtcggcattttcatccatggaaagaaccttatcccggaaatcggacgaaacgagttcttccacactgacgccgaaagattcggcaagttccagcagcaaatcatcgctgtattttaccggcgttttggatgtttcctcccgggcgggttccatttttaccgcggtcagctgtttggagtttcgccggatcgtcttaaattcacgttcagaaagcccggccaacttccgtagttcctctaaaagaatggccttcatcgtttccgtttctccctgccggcggaatgacttctttaacatacggttgataccgtatttctcgtacagttccacgccctgaataaagttacgcggaccggccagataggtaataatttcctgtttcatactatataaaatttgatgatacaaaggaaaaaaggggcaattaccctaaaaaggacaaagggtggccgggcatgtgctgccggtcaccctttgaattacatgaaagccgtttacttacgcctcataacggctttgttcaatccatttcatagcctccgaaccgtcgttaaacgcccgcaacgtcagttgggaaccttcggaagcggtaaacgtcttaccacctttcagaaggaaattaccgcccgcttccaccgtaggcgcaacacccgaacatcccataagggtaattaccgagccgtgacttccaccggtaacaccggctatcttagccgcacccgcggaaagctggtactgcccgtccgtctggtaatctatatccgtggctccggcttccaccacggccaccggttcttccagagtgtcggtaccccggtaaatggcgatatcatcccctttgctgatctgggtgaaagtaagttcgttcgtattcgattcattggaaccggtataagaaacggataacttacacgggttacagggcgttccgatcagatcggcaggctttccgctacaataacggagcacaacgatacatttcttggacagccagtttgtcttaaactcgcgaatttcctgttcgttaccgggatgattgaacttaacggaaggcgtataaccttcggcgtccgtttccccgtcactgttggaactgatttcagcggtaccgggtgtcaggtaaataccgatcgcgtaacgtcccgccttcattacgatatcatcctcgataaccacgccggcatcgtttctctgcgggaaggaaagaatatcgtcaacgtcgtaaattacgagctgatccttgggctgaataccgttaccgggattgccggccggccttcttacgcttgcttttacgtatgtcataacttaatgatttataaggttataaaatggaagggataaagtatcccttccgccaaaaattagcctcttgccacttcgtagaatttaccgtcggcggctttcgccagcttgataaacttgccttcggaaagcgtcatagcttcggttaagacaaagtttccgccggctgcaatggtggaagcaaattcagaaccgcttccgtagatcgtgtaaacgacaccggcttccgcatcggtaaagttagtgattgccgttgcctttgtattctcaccggttacgaatacttcaccgtcaagcaaagaaggatccgtttcatccggcgcaaactgcaacgcatcggaagaagcgttttcgcggccgatctcgataaatttaccgtcggcacgtttcatcagtttgataacatcccccttacccggctgccaggtagcggaaataaggtcaaattttccgcttttctcaatcttaacgcctttatccacgcttccgcatttcagggaaataaccgtacctaccggcgcgtcttcaatatcggtaatcgtaaattcggctgtgttcgctacggtaacaatggaggtatgaagcttggccgacgggttcttgtccttgtcagcgtccacaaagtaagacgccgggcggtcatactcattacagaagatcatctggcgcgtatagtccatatcttctttcttggtgtacttgaagcccacggcaatagcccagatactttcacgccagttactccatactttcaggctccagtcttcctgctccaggttgaaagccgtcatttcgcctggtttgtcctcgtaggttttaatgttgccttcaaacgtccagaaaatacggtggtggttgtcagcattgggaaccgggataatctttaccgccggatattccttcacatacatgatattagccttgtaatcctggttctgtccgtaatgcagttcattgtatttatgatacaatacaataaagtgcgaaggcatataaagtgccaggttaccgctgtcacgaagaaccgccgggatcatggaagtacccttgtacaccttttcaccgatgtttgcttcggtaagttctcccagctcgaacggtttaatctggtaaacgaactttccgttattgatatcggtatgtccgttcactttcttgttcaggaactcatacaggccgtcagctgcagcaagtgctttgcccggttcgttcagattcgggtccttacggattccgttaatacggcgttgttcacgctcgttatgcaacttcttggcggtttcggccaggatgtactcgataaaagaccacttgatagggtttgaaccttccttgttcaaagtgccgatccaggttttctccagggcctttaaatttttgaaacggtgtgcaaacatcacgttgaacatgcgcagggtttcatcgtcgaactcgtaggaacctttagtcaccttgtcgaagtcggattcctcattgccggcctgtgagaactcgcccagccagatattaaccagcgtagccaaatcctgataaccggattcaagcgggaaaatactttcaatggaaggaagttccattaaaaacgactgcaaacgctgttgccagggaatacgataaaaagccccgaggtcttccttcaaacggctgtagtcaagggaactggctttcggaagagcgatcatttcaaaaccggcagcctccattaacgcagctttggcgcgaaggttatacgggcggtccagtgagaacatttcaccctgcaagcctcccagctgcttttcgtcccggagattgaaagcccctttaccgtccgcctgggcgttgtgctgcttccctttgcccggatcatcttccgcggcggctgaaagttgggcgataataccggaaagcttcgttatctcggcatccttcttggcaatcagcgcggtgttgttccggttttcgtcacgctgttgcgtctgcaaggcttcaagctgttcctgcgcctgtaccagacgggcggcagtatcacccaacaaaccgcgaaggaaagcggtagtggtaggttcttcggttccctctccctggtttccgtcttcggcttcgtcctggaaatcgttttcgagggacgctttaaagtccgtgaggaatttttcaggaaaaccgtagtttttcagttttgccatttcctcggccgtgatagagttcttatcctctaccttgctccattccgacaggcccaacaagcccagcatgtgagcggataagctcttaaaatccaatttcatatatacaaaattttaaagttaatactatatgttatacatctcgtttacttttctgacggtgacctgtgccagtacccactttaccgcgtcttccagcgtaccgaactggtcgatatagccgtttgccacggctacgtcaccggtgaatatctgtccccggaaaaggggaagttccggatcataggcaatacccagattccgactgatcgcatcgcagaaaatacggtgcatgacggccagacgctgctttataggctcttcgttgttctccttttcaatcgcgcgggtttcatagtttttcagatcggcactatccggatagatttcccggtaatcaatgccctgtttcctgaaatattccttaaaggattggtaagtaagcatgataccgacggaaccgacttcacacataggggaagcgataaaggttctaccggcggcggtgcccagccagaaatgggcactacccatggtaccggccacgtaggtggctataggtttggaagattcggcaatcattttagccgccaggtccacatgtgcgaccataccgcctggaccgttgatccacaggaccgcgccgcaaatcttaggattatcggaaatatcacggagctgcttttccaggcggtaagtctcccaggaatacaaggtgccttccaggataatgacggccacactgtcagccggcagggtgtcatcatccagttcccaccggttggcaaggtaaggcgtagtagcgtaggcggttattttattattgtcgagccgtttttcgatcgcatccaggttgccggctgcaacacacggcacaagtaaggaaagcaaccggtaataatcattatcagcgattgcccaaggtgctgtaaaaatctcctgtattttgtccacgttctcttttttacggcaaagaaaacgcctatataataggtagagaaggactgaaaggaacctacaggaacgcatcaacgcccggacccgtaccggacagggtgcagttatacaggcccccgccgatctcaaaagaaaaggtaagcgggtaatcgggagaaccggaaacacgggtgttacccgtttcgtcagtatagagggcgacaaagggcgtcgctttcagattttccaggtaaagcgtcttattttgcgacacgtcggcaagcttgaaggtatgttttttagtatagacgtcttcatttttgctgtcacccggttttaaggttcccggtacgatcataagaatatcaggttttccgatagagcggataacgactttcgagagcacgacgccaaaatggataatgttgtaaacgggaaccagttgcaggctatgggcggcggatattaactttcttgacataattacagatataaagtattgataatcaaacattcagcatttttcggacgtttttcagccaaaaaccggacaaaaaaggacaaacagatacagttggtaggtaaaaaataacttgcttttttacactttttttcggttatacgcccttttcttcttacgcctgaaactgtcccgccaccgctggtagtttttcagcagcccgtcttcctgaatggaagagatatcatactttttcaggaaggtaaaaacggtttccttaaactcgattccgtgcaggtgcttgttttcgtccatgagttcgtgcagctcggcccacatcagggcacgcagacgcttttcaagaatggcggtaccgcgtacggaaatgtaattgaactgttccggagacttgccgccggcaaaattggcctcccggcggtcaggcagcataaactccaggttgccgcggtcagccggacaatttaccggccgtttctccatgagatcgtaaacggtcacatagatatcggacgaggaaggaaaacggacggtaccgaccgtttcgtcgtaatatttgccccggacatactcggccaggtaggattcgatctgtattcgggtggtaatcatagcaataacattcctttttaaaggcaaagatattcctttatcggctgttggtctgccatttacgggaaaatgtaggctttcagtcgtcattttgataaatatactccgggagaataattataatatgccttttccagccgccacacacccgacattttctctgccaggctgtgctaatataatccggtactaaatttttgtaatttcgtaaccgggcaaccgacaaaggtaaaatcctgtatcttagcaacttagtaacgttactaatttccgttacaaaaaaatggccggaaaacagtttgtaaccgggcttaccggtagaagataaaaaggccggtgttacaaaccggaaaaattcgtaaccgttttgtaactgcaacttcgtaacctttatttcctatttatttatttgattttcagacttttttctttcaagcaaacaaaggttacaaggttactaaaattttgtatgaaatagaggtggggtatggggagggaagccgggcgggacgcatttgtttccatacgaaaagagggaccgacacattcgtatctggtccctcttttcgtattttataccggctccgatccgtcttatacgcgatgtttgcacctgcttaaaatccatttctttacgtccgggggtatatagcggtgcacgacggccgtatagtcctcgttaaattcatactccaggtagttgtcgccttccaggataaaaacacaggccgttttgatgatccattcgagctgctcgcccgaatagcgttccagtgccaggacggtaccgggtttcatacgctccagatagcggtagacctgttcggcgaatttccggaacctctcgccgctgttccagagcgcggtaaactcggacatgctgtttaatttcaaatgcgcgttattcattcatccggtcgttcatcaggtacaaacatgagtgtcggatcggccggttccgttccaccaccggcagccgtttccgccgtgccgcatgaacgcagatagatcatgtcggcggccttgccgtcgttatccttgcgtacgatacgcccctgggagttgcaaaggtccttcgggttgagttcgtcaatgtaggggcaaagggccacaaaacctttgagggcctttgtaaaacgctgcatcgtgattttattcacaccggaaaagcttttgtaatcggcgaaggccttttcacggacgataaaacagtccaggtgctcgctgtccggagagaaataagagttcgcccagtcctcaaagttattgcccatatcggccttgtatttacgcctgataatgttttccatgggcggaagcaattttatagattcctcgcaaagggaaaggtaaaaacggcagcactgcaagaagaaatttatatcggcgttccactcgttctcgctgtaagtcttggaaaacaaatccttaccgaaatcgtcccggatagaacgcgtttcccggtagtcgttatcttccgtacgctggtggtagtagtcggagaataccaggtacagcaaacgggcttccgtagacggatcaaaatcaataggaacgtaattagttgtaaatcccagcttggccgattcctcgaaaggtatagtaaacgactggttgttcttcgggttcacggtcatatctgacgtgatgatgtcgtaaaacaggcccgtattaagataccggtcgcaatcatccaccagaataaagtcggtatgctggttcacctggtcgaacacatgcggattatccattaacttgggattacggccggaaagcttgacgctcttcataaagtaggaaagggccttgaacatgaatgatttgcccgaacgtccgttacattcaccgtcttcaccgatcttgttatccatggcctgtggtgcccaggcacgcgaaggggatttgtaccgatgcagcatataaccgatagtaaatatcttattgataaggtttcttttctgttcggcaacttcttccgccgtgaggccttccccctcgatatcgaatttatgtttttcccggtaggattccgcttcccccacgctcttgtcgtcgaaattgtattccagttccttacgccagtaaacgcggctcgaattgattacatagccgaaaaagttagacggtacggcatttatccggatatcaaacacatcgttgccctctatgtcttttttacgggaaatggtaaacatgtcttccataagacggactttgtgtttcagtacgttttcttcccaaacgtagtgggacaatgtgctgccgttggccggatgttcctttataccggtaccgcttacctccatgctgcaaccgggaaagaagaacatctgcgtattatgggtataattggtaaagtccagttctatttcctgcaaattgtccagggccgtatctgacagtttggggctgttcagaataagattccttatatcgcgggataaaaagttctcttgggcccactcacggataaacttccggatatcctttgcctttatcagttttacaatattgccggtaatacggatgtatttcgttgaactggaattttcatcatgaagcgaatagaaaccgttaagacgtaaaaagtagtgaaggcagtccgcgtctatattgtgatcccattgccgggatttctcgttaaacttggaataccagaatttggcgggcatggcaagcgtcataaggttacggaaatcctcgttcttgcttcgtaattccataaagtcccggaagtccttacggggtttgccccgctgatcccggtaagtggtaagccaggccggtagccagatcgtgtggatatcgataaaacatagtgcaagttccgtaccctttaccctgcccgtcgtgtcgatatcgggtatgttatacaggacttcaacgtatttcatgatctccttgtagtcctgttcggaaagtttatatgtttccgaattaaaccagatcggggaaaagcccagcgatttaacgcacagggcgtcgcgctctccggaacatataaacgcctcctgcagcttctgttccttataaggcttttccgcattggccggattctttttaaaggcggcttcttccctggaattaaactcccggtataaggctttcagttcggaaagaccgtttatatagtccttcggcttgacaccttccggggtgtaggaaaaacgccactgcttgtccggattcagaggctcgtatattttatagaacttcacttcgggcgtgtcgccttcggccggttttaccagacattcgcgcataaagatagggtatgtcgcagtcgcgtatttataggttacctcgcgattttttacataccctatatatttggccgaataccagtgcagagcctcggcgttctcctgggtgacacgggggccgagtatgcgtaactgatccggggtgagatgatcggcaagctcgaaaattttagtaccgtctttctgatcctgggaggccggaaccttacggatatccggcttgtttacgttacggttgagttcatcggttacgttgtacatggatgcaagtttaaggatcgcctcgttaaaccggaggccttcctcatacatgcagatatcgacagggctttgagccgttccggtatcgccgaaatccgttaccttataaacctgctgggaaccttcctttccgaatagcttgatacaggccgacgcgtcgtcttctgacggccggcgtttgaaatggcggttggttccgacacaatcccgggcttgcggataataatgtagaataatatccagcccgttgttggttactttgtagatgtcttctgcctttatcatcgttataaagttacatagttacttatttttcgttgttttcctcctgctttgttttcaagtctccccaaggttgatacaggaaaacgaataataacagccaaagaaaagcggttttacccgtataataaatgacaaaggcaatcagtcccataaaggcaaccacgataatagcgtgggcgatgtattttaaatttttatctttcattgttcaaacatgttatactgaattgaaaaaccgaatttgcttaatctcctttcctggagaagggaacgtttgtcatgtgaaggcataatgaccaccaggttctttgtatcgaactggtaacctttcttccgcatctgataacgtaggtttcttaggcgtctgtcttctttcatggcatttcgttaagatcgtcttagtttatagaaggcatggcacactatcacaaaggatagcgtttaaatcctcctgtatggtttcctgttgcttcttgttcaggtgtaccaggaaataaccttttccgtcggaaagattctttatttccgccagattatacttccggtccattgcatccacgaatgcaggggattccatggggcggaagctactgaatattttataggttccactactgccttctattcgtaacgtggttaattcatcgggggtggtaattgttgatttcattgctgtattatttttagaaaagtccacataaagtgtaaaaaactgatttatatttatcgctctttcttcttttgtattagaaagatacacccttttatttttcttatccatttttatttaatctcttgcatcagccatttttcggcctttagccgttgccgaatagatattcggtttatcacctttgaaacatttagtctttatccattcatatctttcagcttcccggagataaaataatattccgtattcagatgtatttttcaaccaatctaatttcttgatttgctcaaatgtcataggaccgccatatacaagcgatgatgttaacatctgaactctttctttcaatgaatattcactcatatttaatttgttttactctaattgattcttacatacttgccacttatgttacaagtttttagtatctctgcgttttcttctccaaaagcgatcaaaacagcaccacaaccaggcgaatccccccgtattccgtccggcctgaaaaaacgaatccttccgcgtagaaatttaattgccgttgccttctcaaatataatatcctggaacatcttactatcacagcggttgaacaacagcgcaatgccattgccgtgttgtgccagtttacgaacaaattgttcaataagcggacgggaataaggtggatttaaccagacacgacctacccaatctttagttaatccgtcatggtttttgttgtacatggtttctgccgtttgccaaagcggtttaaccggagcacatggatctaaatcaaactttcctaatgcgtctataatttctttgggtgtataccactcatcagtggtattagccgatttttcaaaggttgtattcatatctatcatgttatgaggggttatacaattcatatccattatcccaaagactatcactgcgaaaattgaagaaatcttccaaagagatacgtacaccatcttctaaaagaagaaatccgttttcaatagtcatccattcgtcagaggaaaagaaacggtgcgtaaccttcttaccctctttcattgcttgtatagcttcttctttgctcattatcttttcttgatttgaattatttttcaccacttatttttaattttaccaattcaccaataggataggtcgtatgtttcggtctgtttattttcactttatgagaagaaagaaacaacggaacaggttctattcgatagaaagtgtagtaagcttctttaggagctgttttttcatattcctttaaatattcttctgctttatttctcgtatcaaatgcggcaaggatagaaaaccaaacgccgtcttcttcgtatattccggattcccttttagttactatgtaaattttgctcattgttgtttatagctgtgccggaggatagcatcgaactaccaataacacccgctttcgcccttcggggttatctccacactccggcggttattatatggagcggcaaaagccgccccggttatttattcacttttcttttccggaagaaaaacaaagtctgcccaaatatcaaggaattgtcgaccgcaatatgctgccagttccgacgttttgaaggcaagccgaacgccgatgaccgcaaacgtgttcgacgaatcgtaatacgcgctcgcaaacgaaacaccgcccaacgcgctcgcgtagctgctcgaccgatacaccacacgagacttttcttcctcgtccaacttattgtattcttcccctgtataaagaataaaccaaggataataacggcattcatcctctgtaaatcgaggttcccagccttcatttaaagctttgacaatgatacggagtttcagaaaagccaaaacgtcaggttcaagaccgagggatattttatctcggttccatgcttctgcatcgatgccaatttcatggcaggcgtcctcaaacgtcttaatacgttttcttacgtctttttctggttcatcaataagggttaagattccatttctccagacagctgttttaccttccggaatttcgatttctaatttctttgatttcattcttcttttatttattggttttcactatggaagatttttacgcctgttacttcctcgatcttatcctttgcaagttcgggaatacgacaacgactacctcgccaattacgaaaggtatgtaatggcactttacatgcttctgccaatttaagggacatttcagaagattcttttaccggcaaattcaaaaggtacattcttagtttctcgccgtcatcattcctttttaatttttttttcgtcatacctttgtgataaatatactcattattgttaactttacatagcaaaggtataattatttttaccacaggtgaataaaattcacgttaataaaagttataacaaaggtgtaatatggctaattttttgttaataagagagttatgtgaattaaagaaaatcactatacgagaacttgcttcacgtataggaaaagaagatagtagcatacaggctattgttagaaatggatcaacgaacacaaaaaccattgaggcaatagcaaaggttttagaggttcctgtaggtgtattctttgatgatattcccataactggaataaaatcaaatgaacttgataaagatgcaaaaatagctgatttagaaaggataattgaggagaaggaacgtctaatacaagtcttattaagtaagaaataacctgtaatagataagaaatgtaggcatattgtaggccatacgtttatacaaatgattaataatcaggcgattaaagaacgttacttgaatcacttagcagaaaggctgattatcaaatggttaatcagcctttttacttttctaattagctgctattgattgaaaaaaaacgagaaaactctcacttttgagcaatttaccttgtcgaaatcttgtccgagtgttttctctaaattttgaaactatggcaacaatcagattagctctaatcccagcaaaggtgttaagtgatggatctcacaaaatttgtatagccatccatcacaaagaagaaacaaaatacattgtcactcgattcaaagtcgacagtctttcacaattcaaaaacgggcaagtagtcaaacgtccagacgcagcactaatcaataccaaactacgtaatatactcaatgaataccaagagaaacttgacagcatcaaatgcattcagggttcctttggggtcagcccgaaaaaacttctatttttaattatgactgcactgatagtagttggatgtagtaaaagtgatgaagaaaaaagtgacattcaggaaatttggctaaatggatacaaagctcttactccagagtctgattacgaaaatatttccaccacatttttattatttaaggctgacaacaatgaggaatttgatgtgaaaaagcaaactttttcaggaaatatacttgattatcaaaaaatacaagatgaaacttggaatttgctgtcaaaatcaaaaattaaaaagaaagatggtagcatagttgatgctacttattctatatttgcctcgtcaataaaggaaacatatacttccgctaaagtaaagattggtaaatattttatggtagcaatatatagcgactctaaaacaggatatcattggctatattcaaataaatatgcttgtcaatatgttgacataccatatcgatataatccatgggactattctgtggttttcccatgtgatttgcataattatggaaagatagaatgggtttcatggaatcaaactccttatccatatgagtttgaattttcaaaataggtccatctgccgaaaacatttaaaatcagcaatactcatttcaaatcggactctctataaaatagagcaatttctcaagctctgaaaataaaatatagatacctctaacactttactgtatctgtttcaaattgctaataataaagcgatgaattcaaattcatcgctttattattagccctagatggaaatatttcctttactcttttgtattctcatcccccactatacctgatgaagaattatcaggagcctgatctatcaaatccataaactgatccagtttaggagttataataatctcagtccggcggttacgagcttttccttctgccgtatcattaccggctaccggattaaattcacctcgaccggcagcagtcaggcgtttgggatttataccataaatattctgtaatgcctgaacaacagatgaagcacgcaacgcactcaaatcccaattattacgtatattcgtacgagatatcggatcggtatctgtatttccttctaccagaacatcataatctttgtagtcctgaatgattttggctattttactaagcacagcctctgctttattgctaatttcataacttcctgatttataaagcatgttatctgctaaggaaatatatacaacacctttcaataccttaatatccaagtcacgcatctcttcacgggtaagcgaacgggtaagtttattgaccattacgagattcaaagagtctgatctattcttttctttaaccaaatgctggatgaaacggtttgaagcattgatctcatctattaacttacccatattcatattcccttgagagctctgtgtaagactcttattcaagatgctttgcatatcggacaagctcttgcgtaactcactattattccgctgcgcttcggcaagtctctcctcaagacttgttgaacgtgcctgattttctcttagctgcaattgactttcctgatattctgtttgcaactttgtataatcagtttttaaacctttaaattgcttctgacttacacaactcgccaatactatacatcctgtcagtactaacaacggtcgaaaaagattcttcataactctattattttaattactaactttttaagtgaccaactgcagccgtttccacaacaattgcgtaaatcggttggttatgaacacatttatcgagataaagctcgaacgaccttataacatttcaaaagaacgaaaagtttagtatgtaaataaaatctgtttttatcagagtttgatccatcctgccaagttatccaacttaattttataaatttgcaccatactaaaacattactgcgtgaaaaacaaacgttggatttatttagcaattacttccgcaattatagtgttaggattggcttcccgaaaacatggtgatatattgcccgaatttatcgcagagtattcaggcgatacgctttgggcagccatggtgtattgtggaatacgctttcttttcccgtcattatctatactcaagaccattgttatttccttattattttcttattgtatagaaattagccaactataccaagcagactggacaaatactgtacgaaacaccacacttggagcattaatctttggacatggttttctatggtcagatatgatctgttatactgttggagtatcattatccgctgttatagattcaggaaggattattatctcccaaaagagaaacccctagaaaaaaagcactgcaaacctactttgtttacagtgctctttccgattatcatttaaactacctatcacaatctacaatgaaaactatcgctcaaaggtaacttcttattagtggaaacaacctttatttcattttcaccaggttctagttccacatttttccattccagaatagcatacgaatccggtattgctttaccataactcttaccgtttacaaacaattcggctcctgacagattcgtgaaagcagtaattgtttgcaaacgttgtgtacgtactgtgttacgtttgcctgttaaataaagcattggtttttccctattccagttggccttatagaagtagaaagcatctttacgaactttccggtcgaaggtaaccaaacctttatcattaattccgggacggtctccttcagtgcgatgtgcagcgccaaaatcaaacatattccagacaaagctcccccatacataaggacgggaagagattgttttccagttttcaatgtgataatacgtctgccagttttcaggatgccaccaactggttggtacagttttaaccaacgaatcttgttgatggtaaatacttgcgccggcaccatattcactgatagcaatacatatttccggatgatccttatgcattcgatccaaccatttccccaaatcagcgggagtgccaccataccatccatcataacgattccaggcaatagcatccgttatgaaattcaaatctcccatttgattacttgcggaggttgtaggccgggtagtatcttcctgatgtgccagcacatttaattctttgatgtactcaaccggattatctcccaactccgtcaactcattaaacagcccccatacacaaatagaaggatgattataatgttgacgaatcagttctttgagctgctcttttccgttagcacggaaagcaggtaaatccacaaaacctttatcattatatccaccaggacccacaaaaggtatttcagcccatacaataataccattcttatccatcagatcataaaaataagtagcctgcggataatgcgccaaacgaacagcattcactcccatctccaacatcaatgccgcatcttcctcatggtgttgcgggcgcagcgcattgcccacctcactcctatcctgatgacgacaaacccctttaagaggtaaatgttttccattcaagaaaaaacctttatcagagtcgatccggtaaaaacgaagtcccaacggttgtgtaacacgatctaccatctgaccattccggaaaagagtcacttccgcctgataaaggaaaggatcctgacgaccattccacaaatgaggctgatcgatttcaaatgtaagttcctgctgcattacttcgtttccagaaagattcacattctttgttccttctttcaccaccctttgaccatctaacaggcgtacgttaagctccacttcctgattaccactactcccgtttgataaatcaacaatagcccgcaccttagcataccgatggctcacactatcctgtatcagacgtactccgggggaagcataatccaaaggagaaatacacgtctcatcagtaatcaacaaatgtacatcacgataaatacctccgtaaaaattaaagtcaccgaccagaggcataatatccaactgttcaccattattcacccgtactaatatagagttttcttttccatattccacctttcctgtgatctcaaagataaaagctccatatcccccacgatgctcacctatatgacgacgatttataaacacatctgcaatgttattcactccttcgaaacgaataaaaagacgttttcctttccattcgggacgaataaataaattcttctcataattaccaattccccgtttatagtctatcttaccggacaaagcatcctgcgcattccaagtatgaggcaaatcaactcttacctctgttcccttctgtacctgatgcgaaaaccggaaattccaatcattatttagcaagatatcctgtcgctgggcaaacatcgacattccgtaaagcatgaataaaacaaccgataccaaacggctggactgtaataaaactgttttcatattatttctttaatgatgacttctttattctgataaaagaagataatgattcaaccttattcttatattttttttcatcgacccgattcttgttttccttcccgtcaatccgatggtcaaacaacatactggctttcttcacgtcgcctttcatccattccgcataactataacgccggtcaacggcattatctcctccttcccactgaatatagacttcacctttcgtcttagctttcagattcttgaaaaccccggcaaagctttgcccgcttagctgttcagcgggaacaggcagtttacaaagttcacataaagtcgggtacaaatcaacaaattccaccatcgattttgtttttccttttttcattcccggcacacggacaatcaacggtacatgagtagaagtattcatcagattatgtttacctataaaatcatgttctcccagattccagccatgatctcccaacaaaaccacaattgtattatccgataatcccagttcatccaatgcatccaataccttgccaatctgtgcatccacataactcaaacaagcataatatccatgttttacctcccgctggaagtcaatatcactcgtatccgcaacccgtgcatacgcatatatctcgctcgaattacgaacctgctccggcaatccttcaggtcggaaacgattggtagccaaaggtatttcctcccgtttatataaatcccaatatttctttggggcattgaacggcaaatgaggtttccagaaaccacaagccaagaagaaaggtttgccagcctccttcatccttttcaagtcacgaatagctcggtttgcaagtttcccatcatcataggcagtatcaggaacatcagcagattcacaaaaaggtcccctcatcgttttcggattaatcgtttttcccgattccgaattcatccaaagttcccatttattatattccgcccaatatacatcatatccatccggatgattccggtaaggaggctcactccacgaatccgcatgatcgctgatatgatgaaacaccttgccgtccgaaatagtatgataaccattccgggtgaaccatcccgaaataggtattgcttcgggacaatctttgctggcataggcggaaaaactaataaagcgatcggggtaatgaggatatacacccgtcaacaaactagcccgggatgccccactcacaggaatattacaatacgcattctgaaacaagacaccacttgccgccaaacggtccatattaggagttttcactacatctaccccgtaacaccccagttcggggcgcatatcatcagccattataaaaagcacattcatttgggatgcatcctgttgtgcacgtagtatagatgagatgcagcaagctgttccacaaaaaaacgcatattttattgatattctatttttcattttctaccttaaattttcaagacctgcaatatactaaaatattacaggtcttgtgcatcatttcaatttaaaattactttgtccataccggattttgttccaaatttgtatttaacgccaattgcttcaaaggcaacggatacagataataatgttcctgccatccaagcggggtatcaaagaaataaacatatccttcatcagcacctgcaccacccgttactttcaaattcttggccgaagcccctgtcacataggcacccagcggttgtttgttaacatagtctcctttcttccacctgcgcaaatcatccaaacggaaaccttcgcccatcaattcaactcgtctctctctacgcacttcccacaaaagagcaggaacggaaggatcacgcttcggatcaaaagcatcattaatatcattcaccaccattttcgccacattagctcttgcccgaagtttgttaatagacttatccgcagcagcctggtcgaacttgttcaattcgcacatcgcttcggcatagtttaccatcacctcacctatacggaacagtggggcatctgttgtattcaccccattcgcgttggtagctacagtatgtgtattataatatttccatacccagaagcccatttgggaagcgttccagccctgtccccagttcatattcttaaagtgaggttgtccttgcacggtgaatcctttaaagttggaagacggcaaacgatgataagtttcaccggaaatcgtagccattaaatctataaattccctgtcctgtgcattatccgtatatttccaatcagccgtactgggtccgttttctttcttcaccatatatggaggacagatcgtcaaatacaaccggtaatcacgatcacggaattgtccatacatattcttatcacccccataacggctagtcgtcgtgctaaccggtcgtccatccgtacaaagataactgtctaccgcgtctttcgttgcctcaatataagattcacctgtacgcaccatacgggtcaaaccatgcattaactgtccggtttcataagccttatacaaaagaatacctgtcaccccatccagtgtttccgaattaaacaactcatcatatttaggatgcacattcggatattgcttaatcacctcttcagaagcacgggcacattcttccagataagtatccgctcccgacaaaccatgatattttctccaagttccttcaaataaagcaaaacgggaaataagagctttcaccacatacatattaattgtatttttcccatccgcttcgatattactgccaatatgtgtttccgcatatttcaaattagacagaatattggaagccaccaagtcacgactatcacgttttccataaagctcgggactttcctcagtcaaagcatgctctacccaaggaatatcaccaaatttagaaagcatctgaaagtatttataagaacggaagaaatatcccacacttctccaatgccccctctcggtttcactcatttccgaatgatcaatattatcgagcatcaggttaacacgacggatataatcataatcccaatctttagattcatccgtagcctttgctttgcgatatgcccactgaccttcatatccatccaatccttttatcatgttatccgattcaaaatcaccacggaaaatttcatccgtttgccctgtatcatacgtatatccgaagaacacgttatacaatccccatgtatacgttttaaagttgtcataggtagtaaagaccgatgcttctgtttgctgtcctttgggataaacctccagaaattcgtcatttagacaagacgacatcaacaaacaaagactaacgcttacacatagtatatatttattcataataattactctttaaattgtgaaacaatcagaatgaaaggtttataccgaacgaatactgtctcatatacggataggtaaaaccacgttgtcctaaatcatccgtgacagaacgttccggatcaagtccctttggcaagtggtcgaacgtataaagattctcaccactgaagaacacagccagattattaactccaatcttactcatccacttagacgggaaattataagaaagcgttatattacgaatacttaagtacgatccatcctgtagataacgagtctgtacacgtgtattggcatctgtatttccggccgctttctcataaatacgggggaaataactattcgtattttccggagtccaataattcaactgtgaatcataaacggtagtccaagcatcataatgcggataaaacagatcgttcatcacccacaaatctcgtttaccaactccttgcagcaagaatgacagagaaaaaccgttccaacttgcactaccatgaataccatactgataacgccgggtattattaccaatgattttacggtctcccggatctttcgttgtactggtaccactgttgataatatcattaccatccaagtccttatataatatatctcccggattcggattataaccttccactttagcaatacccggtttcagtttgccatctgcatcgaaatcatccactgtgtacaaacgatcggtcacatacccccaaatttcacccagttccattcctacgcgatatgtttcattatcgttcttgtccttgccaaacagtcctgtttcgttgttgtatttagtaatctttgttttcgcatcgtaaagattaaagcctatgctatatttcacttttccgatctgatcgttccagtcaaccgagatttcccaacctttagaacgaaggtcagccgtgttctgtaaaggggcacttgcacctaatacacccggaagttcagagcccggagcaagcatacccttagtatctctacgataccagtcgaacaccatattcaatctgttatccaatagcccaagatcgaatccgacatcaattgtcgttactttttcccaagtaaagctattgctaaccaaagcagctggtttcaaagtagtaactttaataccggaaacagtccaataagcctgttccgcatccataccgggaatatatgcgtaaggagtgatgctctgatttccaatattaccccaagaaccacgcaatttcaagttcgaaagaacagagttcaaaggtttcataaacgcttcctcgctgatacgccatccggcggaaaccgaagggaagaaaccgaaacggctattcttcgggaatttggaagaaccgtcataacgtccgttcgtttcaagcaaatacttgccggcaaacgaatagttaatgcgatagaataaccctcttaccgtatagcgttcaaatttgtctttagcaaaataatcacctgtcgactgcgaaatagacggcagatcttcattaatcatattcatacgcgacatctcagcataacgataatcactactctcctgattgaaacctcccatcaccgttacatcatgtttgccccatgagttgttatagttagcatagaagttcaatgcattataatccgtaataccattggaatattcatacttggaattggcagtggaaacctctttcacaaagttacctccatgtgcataatagaacttcttctcaaatttcgttttctcgttacttagatgattgaatgtatactcaccaatcaacttcacattcttcaaaggactgatcgtaacctttccgaaaatacgaagattattcttttgaatagttgtcggatatgccagatcaatcaagttacgaggagtattgatcggtaattcttcgccgtcaatattcattgttccagtaggaaaataagaaggaaatgcgactgctgctccccatataccatatcctccggaagtttccggcagagaggagttagagttcgtatatttaatatccaattccggagtaatccatgaaaacacatctgaacggagataagaagacacattgtaacgcttgtacgtatctttatccgaagccagtaccccattttcattcaccataccgaaggagaaacgataagaaatatctttcgtaccgccacctaccgaaatattatgagtttgctggaaaccagtctccatcatatcatcgaaaagatcagtttctgccaagctataacgcagcccgtccaccattgcataaccatccggatatgcagacggattagcattatattccttcaaaagtcccaaccaggtatctacgttctgaccactttgataattgattgtccccatgtccttataagcctgtaccgtttggagcggagtagccttatgaggcatattggcaggtctgctaaaagagaagttatttgaataattaatagagagtttagttgcatccgagcctttctttgtagtaatcaaaatcacaccgaaagctgcccgtgctccgtaaatagcagaagatgccgcatccttcaaaacagtcaccgattcaatatcgttcggatcgagcatattaatatccatctccacgttatccaccagcaccagcggtttcccattcttatccaaactgttgacaccacgaatgttgaaactcatttcttcaccgggtcttcctgaattacctgtaatctgcaagccgggcattgcccctttcaaagcgtcactcacagacaccaccggacggtcacctaaaacatcatccatcttcacactgctcaccgcacctgtcaggttcgctttcttttgtacgccgtaaccaacaactactacttcgtctattaaccgagtatcttctttcaaagttacattgagaggacgttgatctttcaccaccacttcctgtgtggcatagccgatatacgatatggataaacgggcattcggagtaaccatcaaagaaaaattgccatccatatccgtaatggtaccttccgtagaatcgaccactttcacatttgccccaatcaccccttcacctgtaggatcagtgattctaccttttaagacaaacgctttttcctgttctttctgcggtgtcactgcatggaacataatcacccggggtccgttcacttcataactgacgtccgtaccggccagcaattgtcccatcacatcattaatagtaccgttatttatattcacagagactttcctattcaaatcaatgtcattattacgaatcaggaaagagtaattgccttgcttctttattacttcaatggcttctttcaaagtaatattatctactttcacactgaatcgcttactttgttcctgtgccgatagctggctccccccagtcaaaacgtttcctacagacaaaagcagaagcattaataatattctttttactattaatctcatatttttcactattaaaggttaacataatatctttctatacaacgctgaaccgccgatatatctatcgactaagttcccaatcatactttactttttcttattttacctcctttttcttgtcagttataaagatagtgtctccactaactttccatgtatattgcttctcaacgttgatttctcccaatatatcattgatactttgattactattgaaacatccggaaaagcgttccgctttcagacgttcactctctaaactgatcttcacctggaatttgcgctccagacggtgtgcgatgtcggcaaacggagcatcttcaaatgtcaggccaccatccaaccagtcacaggcagaactagcatttgatttcattttctccatgcggcccgtattcttatcgtaaaaagcctgttcgctagggaatagtttcattaccgaaccggacaaagtggctaaattgacacgaccttccaacaaagataccattacataattatcgtcatcataagcgcgtacattaaaaacagtccctaccacctttacctgtacaccattcgtatttacaaagaaaggaatcttctcatttttcgccaccttgaaatatccttcgccatcaagcgtaacatcacgttcacgaataccgaacccacggcaataacgtaacacagaacccgcattcaatgaaacctctgttccatccggaagcacaatattcgtccgcgaaccagctggcactttaatttcataaggagaatccgcattcgtatatacttccgtaagattttcagtataagtgtaccagaagtaattacagcccaacaacaaaataattgcagcagctaccttcagccacacaggaactatcttccgcgaacggacaggtttcatctcagcagcggctattttttcttttatctgtgataaattagcatcctctactttggcaaatgcaggcacagaagaaacagcccatactgcggacatctcccggaaaattttagctgcatcttcattggaagccagataagcgaacagagcttctttctcctcttcggtgcagttaccggacagatagttgcttatccggatttccaattcttctatatgataagagtcattcataaacgtactttttctatgggtgtatataactagatacgcaataaaaaaagaaacgtttaaaagaaaagcgattttttttagagaaacatcaaaatagctatcatataaggagtacccagtgattcgcgtagcttagtcaatgctattttcatctgtactcttacagtggtcacattaatattctgctcctcggcaatttcactgtatgtcttaccctcatacaaacttgctttaaatatggcacggcatttggctggcaattcctccaccttcttcatgatgatggtattcatttcgctatgctccaatgcctgcaaaggattatcggaagaaagaatatgattttcgagaaaagcccagatttcttccatctgttccgtcatctgtttttcgttgaagtaggaagaacgcagatagctaatacttgcgttttgaatagcacgccgcaagtacggaagagccgggtgagtgatatggtggcgattctgccaaaaagcgacaaagacatcattcacaatctcccctgccaccctcttgtcatgcacataataaacagctatcgcacacaaataaaggtagtaggtatgatagattttatcaaatgcttttgtattaccgtgatttaactgttcaattagattttcagagatttctggtagattcattcgttgtctttctttaaggaacggtgcaaatatagcgattaattcagaaaaacaaaattccaatcagataaaccggagcccggcaatcattccttaaccctacaatcccatcggtattttcaacaaataccaaacgataaacagcaatgtccagacaaccaggatgcctaatgaatatctccaagtatatttcagcaatgaaccatacgtaatctgcttatcatattgccgcatataggtaagcaccagaggcatatagaataagaaaggagtaatggcattcgtcgaactatctccgatacggaaagcacattgtgctatatccggagcaattcccatctgtgcaaacatcgggataaagataaaagacataaaagcccatttggaggtagcagataccataatcagatttatcaatgccgtaaacagaataaacagaacaagagcagacaaaggagccggttcaaacgaagaaagcaagtcagcccccataatcgccagacatttatccagatgggaatattcaaaacaggcaaacatctgcgcagcgaagaaagcgataacgaaatacactccaagaagcttcattggctgcgtaagtccttcaatcacatcattgtcagtgcgataccgtccggaactgaatccataagccattcccgtaatacctgctcccaaagaaagcaaaaacaaaataccggcaataaaaggcgaatgcatcaaaccaccattcacaccccgcaaaattccataagaagaaaaagtaagccacaagataagagccacatagatagctgccacaacaatggaaatcataatggcacgccgctctttacgagacagaggatggtaagccaccaccttcatactgccttcatacttacctaacgtaggaagaagccatttttgagtaatccaatacacaatagccgtaatggccaccgttgaagcactcataaaaaagtaattgcaaagaggttctgtattcccctgataacccgtttgtgccagtgcagcctcttgcgtggtatgcgccaacaacgggtccatcgtactcaatacaatattagcactatacccgcacgcaacggaaacataagccgtaacaatccctgcaatcggatgaagccccacccattgaaacagcatagcagcaataggcaataaaatgatatatccaccatcaccaatggcattcgacaacaagccaagcacaatcacccacaagatgatcttcctcttttcctgccggtttcccacccccatgcggatacaagcatcaataaaaccggaatgttgtgccactcccaatccgaacatagcaataatcaccatgcccaatggagcaaaacctgtaaagttcttaatagcattccgcaaccaccagcggattccttccggactcaacaggctttgtacacggatatcctcacctgtctgcggcaatgtcactttcaatccatagatatcgcatatccatgaaagaaagaccactgccattgtcagcagaaggaacatcgtagcgggatggggcatgcgccatttattcttcatcattttccgactaagcaagaagctaccgttaatacttaatttactcttcgtcaggctccagattatccagatcaataatacgcaattccaatgcacgtactgccaaccgggtagcattcactcccacccgttctccattcgggaaaagacgtccaataagatcattctgccgtttctccaatgatttcacaccaaaaggcattcctttcagattggcaatcatctctttcgtataacccaaagccagatgacggagaaaacgttcatcgtattcatcaatatcatagctgatgacagcctcctgacgcttagcatcattggctacagatttcttgaaacgatctacaatcttttccagaatcggatagttaaataccaatttctttccatccatcacagcctgtacatctgttttcgtcagtagctcacccgttttgaggatgattccatcggcaccggcattcaatacgtccacccacaacttttcgttcagaatctcacccgtgaagatcaatacccgaactcctttgtaacgtttgaatatattcttgcaaatatcaacaccaatggtcgtagaacctcctagtcctaagtccaacaataccagatcgggaagctgggcctccatcaacggccaaaactcactttccgtcattgccgtgccgattacttctgcattcggtatttcatgacggaatatttcttctgtccctttcaactccagttttacatcctctacaataataactttaaacttctgttcttccatgttccttatctaataacttttatgtgttttccttttatcggcgcggaatagtgaaataaactgtaaacccgccgccttcagccggctcggcattgatacggcatcccctacgtcccgcaaattcgtcgtggtcgcggataatctgcttgcataccagatattccgttcccctcaactcccctttttcaccggaagtcatacgtgccagattcggataaaatagttgattcaactcttccacactcttctcacgtctcgtatccgtaaagaggaaacgaatatattcattatccttgcgcgcttgcagacgtatcactccatcttcacgcacagtcaatgcttcatcaatcaaattttccaatagaaaacgcaactgattcacgtctcctatcaccttcgcctccatcgactctatttccaattctatcctctccgaccgattcttcatcaacttcttgaaatattttccggcagcatccaaaagttcctgcaccggaatcaccgtacgccggaaagtgacttcctccaattgacgagaagcgcacgaactcaaaatcgtaaaaattcccttataatattcgatcaattccgtcatagtctccactgcttcacgctcctccgtttccgaaagcttctgcgtattcaaccgccctacaatctgtttgattttattcggataataaatcgtctcatgtttaatagtcgacagacagttgtcaagcaccatattctgaacatgcaacatgctgtcttcccaggaagcccggcgtgtttcttcgtgtgccgactcgatatcccggtattttgtagccagtttcaccactgcgttaaacacaacaatagccacataacgagctaccagttcaaaaagcagtcgatccgtctcctgttccgttccttctctgcgctccagataaagcacaccaacacattgatgctcgctccctgcttccaccatcagcggaattgcctgaagatgctgttcagaaagatatttcccggaactaaaacactgctctaccatctccggcatttcctgtccgggacgagaagcatattccagccgatgtgtcgtttcattataaacggcaattcccatccggtcaatcgtcagtaattcatttaccgaaccgaatgcttcatccacaatccgctgcggaatttctttaagcatactctcttcccgttgaagcgcctctgcattttcctgttcctgcggtctcaccaaagatgcagcaaacaccttctggttaatctcaagtacctgttcgagattcaaacgattctgcaaacgttttctcatgtacagaaaataatatccgaccaacgaaacaatcaataaaacaaagcataaaataattcctaccgtcttattggtattcgaacgctccaactgccggcaatatgcttcgagagtttgatcctctccctgcaacttatacaaatccgtaaatgccgaattattataactatatgcatccaactgtttcaaagccagaaaagcaactgacgcctcattcctgatatccaaaattacatgataatccgaatcaaacagttcgttccaccaactgatttcagcaggcgttccctcacctaccagcttcatataccgatgcgggcgatccggacgcgcatatttttcataatgctcattcagaaaaagcatcgcagaatctatatattgcaaagccaactcataattttcatccacattagcaaaataggcagcattcgcataatccgacgctacatccagcaaatcctcatacgcagaatccgtaactactacaatcgaatcgccatcctgcaacatgggaggaatcggatcatgcagacaagaaaccatccccaacggaagcaacaagcaaagcaacaacacccccatcgctttacgcactcccgaaggcaaacgaaaataaaaacggcttcccttccccagttcactctccacatcaaagacgcatccccggaataaatcattcgttttcttatacttctcaatgattcccttacaattcatcaatccgaaaccactacctttgttttctttcaacacttccggatcggctgcattcttcattccgatcacgcgggaatcatacaccttctcaccaatgatatgcgccacatcctcttcggaaatacctcttccgttatcctccacagagatctcgacatacgcatcctccgtaatacgggcatacactttaattgttcctccttccggagtatatttacgggcattttccgccagcgtattaatcataaacaaagttagtgcccggtcggccttcaccataaccgtagtcggttcaatttccaacttctgatttttcatttcaaaagcacgtcttcccttgcctagcagctcaaacagttcattgagactgaaagtttcaatattcaggctaagcgttccttgcttcatcttaatccaaagagccagaatatcgttgtactcattaatcgtagttaccagctcatcaatgtattgatacttctctttcttaatcttcgcattatcaatatacccccgctccgtcaacttatgcacttcgttcaagatacggtcaatataaggattaataccattgacaatggccagacaagccttctttataagattctgacgtttatttcccgcaatatgttgttcgtaaacataccgttgcttttccaactgcatccgctcgtcactcaacgcttccaccatctgctcattgtccgcagcccaaacaatatacggttcaagcacatgcaccaatgctttttcatcacggttcaaccgatgcagaggaaccagtgccgcttttccttcctccggaatttccagttgaagacgtcctttcccaaataattgatcgataccttgttgaattaatggaacattcatcggaatggacgaagttatatcccggcaaagagtcagaatccgttgcagacgctccacgtctacctgattccttattttagaccgtttattgaaaaaccaccaaagaataaccaccaatacaagtccgacaataaccaaagaaagtacaagcgtcatttgtcgtgaatcggcttccaatgaaagatagcggctctccaactccttatcctgacgggtataatttaaaatatccaaatatatattccggttgtaatcagaagcatacttcatcccgagccccgcatacgacacactcaattgctcccgaatccttgagatccattcaggtaccgttctcacatcttcctgcatgatccatggaaccccggtataagtcgtatctccttctacaaaaacatgtagtttatccaatgtatccgccgcatggtgataatagagcatgtgatgttgattcacacaatccaacgcttttgcaagcgtatccaatgcctccgtataacgtccgtgctcattcatatatttaccgatagacacatacgcaccggcaatctgatacaaatcattgtactcacgaaatttttcaagcgcacgctgtgccattcgcaaaggcaaaagcgaatctacgggaaacccaaactgatccagcgcatatccccttctcgtccgaaaaagttcgaaattattaggtgaaaccatcagattagccaatccttgcagaccatttccttcgaaataaggatgattagtctgaacagctgtccgccaggtaatataaagttggtcgaactcacgcattttccggtcttccggcttggttgcttccaccaacgaggccgaacctttaatataatgataataaagcaactgattagtatctgtcaaagcttcatcttccggaatccggttaagagatgtgatggcctcctgccgttgctgcagatagtaataataaatagaagaaacgatgaaaaattcggtgaatgcataatccagccgtagtgcctcgtgacggtcggcaaacaaatcactctcttcacgaatacgtttcatgcgcttgagcgcactattacgataatcataaaattctttgttcatagccgtccgctgacagattttcatcagtccgatgtcggcaatcaacagttcgagttcatttttagtcagtttatatacttccttatgcaacgcttccgcccggtcaaagtccatagccataaaagcacagaaccccagattgttggatgcttccgctttccccgacttgtagaaattcacctgccgataggcttcattggcatatttataagaagaatccaggcttcgataacgataagcatacgctttcccgtttaatgaatcaatcaggcgcacctctttggtcggcaccatatcagtgcacgaaaaaaaagaggcaaacaacactatacctattatatataaaggaaagcgtgaactcatttttgactattaactgttttcagaaagcaaatctacaaatatttccgataagttggagagaaaaatattttttatacaataagtccttctaaataataagagaaattcctacctttgcaggcaaattaacaaataggtaacatctattacaaaatgagcgaaaaagcaccctttatggtattctcgggaacgaactcgagatatctggcagaaaaaatctgcgcaagcctggattgtcctctgggaaatatgaacattacccattttgccgatggcgaatttgctgtttcatatgaggagtcaattcgtggcgcacacgtattcctggttcaatccactttccctaattcagacaacctgatggaacttctcttgatgatcgatgctgcaaaacgtgcgtctgcaaagagtattgtagctgtagtcccctatttcggatgggcacgtcaggatagaaaagacaaaccccgtgtatctatcggcgctaagttggtagccgacctgctgtctgttgcaggtatcgaccgtctgattacgatggacttgcatgcagaccagattcagggattcttcaatatcccggtagatcacctgtacgcatcagcagtattccttccttatatccagtcattgcaactggaaaatctggttattgctacaccggatgtaggaggttcaaaacgtgccagtactttctccaaatacctcggtgtaccattggtactctgcaacaaatcacgcgaaaaagctaatgaagtagcatctatgcaaatcatcggtgacgtagaaggtaaaaacgtcgtactgatcgacgatatagttgacacagcaggaacaatcaccaaagcagccaacatcatgctggatgccggtgccaaatcagtacgtgccatcgccagccactgcgtaatgtctgatccggcttctttccgtgtacaagagtccggtctgacagaaatggtatttaccgacagcatcccttacgcaaagaaatgcccgaaagtaaaacagttgagtattgccgatatgtttgctgaaacaatcaaacgagtgatgaataacgaatctatcagttcacaatacatcatttaacagatgacaagtgataaatgatagttgaagttactttcaacaggaaattataaaatggataatgaccgctttgggttattatccatttttctttgtccataccaattatcattattccatcatctggtacatatatgcaaaaaaataggccacgcaatgcgcagcccactaccatttatcatctattgaagtcttccgaatttataggttccttttttaatcaccttcccatctttatctgtttccacaaaaggaccatttttctttccttgtttgaaaaagccctcgaagcgattaccatctttgtcgatttgtacgccctgtccatcttccaatccgtcaacaaagccacctttatattgcataccagcaacggttttcaaagtaccctgtccatcgggacggttgtctttccagtcaccgtcataaacatcgccattgctccatttataaactcctctgccatcacgtttattgtttttccagcttccttcgtacacagcaccattcgcccaggtaaaagtaccttttccgtcttgcatgccatttttgaaattacctacatatttgtcgccgttagcatgataataaactccttcaccggtgcgttcacctaagagataagaaccttcataacgatcgcccgtgtgaaagtagtaagtacctcttccgtgttgaatatcatccgcccagtcaccatcgtatttatctccattggtatattcaaataccccttttccgtgacggacatcatctttccagtctccttcatacttacagccgtcgtcccagttcatgatgcctttgccgttcttcttatcatttttccagtgaccggtatatttggcaccattcgcccaagtgtatgtaccttcgccttcacgtttatcattcacccaatgacctacatataaatcaccgttatgataatacattgttccttcaccatgctgataatcctgataccacataccgtcgtaacggttgttattcataaaataatagataccttttccatgctgctgatcctggaaccactgtccttcgtacttttctccgtcaggaaacatataaataccatatccttcacgtttccccttcacatattcaccttcaaagacatcgccgtttttgaaaaccgtttttccttttccattcggttttcgtcctttcatttctcccgtatagacactgccatccttaaaagtatagttgccaatctttatttcagtggagaatgtatctttaatttttccgaaaaatccgcctgtttttccttcattttcttgtgccatcactccctcttgtgcaagaagagccagcaaaagtgtagtatatagatatttcctcattggttttagtcgttactcattttagaattacaatttggacaaagatacaatttctatcccaaacagcccactttcggaaagcaaattatgacaactttttacctgcaatgacctcttttaatgtctctttgcacaaatagcgctgtgccaaatcttgtatttccatcggagtaacctcattcacagccagcagagaacgtgaaaagtagtcatcatccagaccggaagtagctatgaagatccacgcatccgaaagtgagaaaggcgactcataactacggcacatttctcccaacatatagttgcgtacaatagtcaattcttcggctgacacaggtttctgatgcaggcggtctatttcatgatacacttcctgtatcaacggttccacatattcattatccgtttctgtcgagatagccaatagtccgctatccggataaaacatgattcctgccgaaataccataagtatatcccttctcttcacgaatattagacatcagccgactgccgaaataacctccgaataaagtcatcaatacccgaagtttcaaataatcaggatgattacgagtaatggtcgtatatcccatcttcacagcactctgcatggcgtcttcacgctctgtaaaaattctctttccgggaacagcagtaaaaggaaaacttaatctcaacacctgctgctgatgctggccgaaagaagtgccgaatgtatctgtcacccggctgataatatcctccgtcaccttaccggacaaaaagatagagcaattacccgaatgataataccgttcataaaattcacggagcacttccggagtgatggcatgataatcctcctccaccactattttaccacatggatgctgttcaccgtaaagcgactgcaacagactgcggtgtgccagaaaatcaactttggaagtattgacctggtattgttggatattggtatcgagaatggtatgcaattccttttccgggaaaagcggttctttaatcatggattccaccacctccaatgttttcgccaaatatttattcaacgaataaacagtgatatatgcatattccgacgagctggacaattcgagccatgagccgtagtaatccagtttctcggcaatggtggcagccgtatattttttcgtgccttcgcgcagcatccggttcgtaaacagagcttgcagtttctgcgactgttgccagcgtcccccggcaaaaagcacatctatgcgtaccacttcctgttcacccgcattaataatagtcaacggaataccgtttggcaacgtcattcgaacgggaggaagtatacgaaaatttttcagggtttgtatttcaggttgtatcgtacgatccataagattagattctattcttcaaaaattcttctgcccgttccaagtcttgcggggtatcaattccaatagtttccacctcactgatgccgacctttattttgtatccgttctccagccagcgaagctgctccaaagattcggccaactccaaagaagactgtggaagcatggtaatctctttcagcacctctgtacgataagcatacaatccgatgtgcttgtagtaggtatgtcccttcaaccagtcctgtttctcggcattccgctgataaggaatgatagaacggctaaaataaagtgcattccagttcttgttgactaccactttcggtgaattcacgttttccagtacggcaaacggttcatcagcagtaaaaggcttcaccaacgtagcaatctgcgtggttgcatcatcgaaacaagcctttaccgcatccagttgtgaaggctgaataaaaggttcatctccttgtatattcactacgacgtcaaaatcacctccaatcttggtacaggcttcataacaacgatccgtaccacttttgtggtgaacggaagtcatcacaacctttcccccgaacgccttaacagcagcttcaatgcgttcatcatccgtagctacataagcgtcatccaaaacgcctgccacttgttcgtatacgcgttgtatgactgtttttccgcccaacacagccaacggtttcgcaggaaaacgagtggatgcataacgggcaggtataattccaagaaatttcatctacttaataaataatgaagaatggaaagcagataatgactgttgtatatatcccctttgccaatcctccggttttaatattttgttatcatataaaagcatgtcaatatccagacatactttttcctctttcttatcctccgaacgacgtccggacctctgttctatatctttcagcattttcctcaccgtctcttcatccttatcggaatagaacagaaccacttggttggaaaacagagccggattcttaaaaaacaaaggtttagtttccagttcgggagcaaaacatatagaagagaacgattcagtcaacttctgcctggcaaaagtcaagttctctttcctgttgtaattactccctatacaaacaatatacttgtgcacttctttaattgaaaagatcgtccaatcccccttcttctatcacttcgccatcaggagtttccgaaccggcacacgggtcaaacccttcagggagtttgaatctctcctgctggtcatatcccaaggtcggatcgtcatacactttcttcatatacattgcccagataggcaaagctgcagcagcaccctgtccataggtcattctaccgaagtgaatatcacgttcgtcccctcctacccaacaaccggataccagtgaaggagtgaatcccataaaccaggcatcggagttatcattggtcgttcctgtttttccacccatatcggcggtaattccatatcgacgaacacgtccacccgttccttcattaataacggcacgcagcataaccagcattttgtaagtgctcgacgcgcttattacttcttccatttgcggtgcaaaagtagaaatgacattgccatcactatcctcaatacgggtaacgaacaatggagccacccggattcctttattggcaaaagctgtgtatgcgctgaccatttcaccgacagaaatttcacaaggtcccagacaaagtgaaaccaccggatcaattgctttattacgtacaccgaaactatgaatcaggcgtaccaaatcatacggattcagcttacccatcagatatgcagaaatccagttatcggagtttgccaatccccatttcagagttaccatttctccataacgcttatcatttgcattacgtggtgtccagggagttccattctcatcaatcaaagtttgctctacgtggcgtgcctgatcgcaaggagaaaatccgttctccattgccaatgtatataaatacggcttaatagtagaacctacctgacgacgtcctaccatcgccatatcatactggaaatatacataattcggtccgcccacataagccttcacgtgtccgtttgccggatccattgacataaatcccgtccgcaagaaagatttgtagtagcggatggaatccatcggtgtcataatcgtatctttatcacccttccaggaaaagacagtcatttcttccggtgtatcgaacgccttacgaatctgttgttccgaagctcccgcctctttcatgaggcgataacgttccgtttgtttcattgctttcgtcaacaactcttccactcgtttttccggtagtgatcgtgcatacggagcattcttacttccctctttttctttgaagaatataggttgcagataatcacccaaatgctcttttacagcatcttcggcatactgctgcatacgtgaattgatagttgtataaatcttcaatccatctgtatagatgttataatttgtaccgtctttcttcttgtttttcgcacaccagccatataacgggttagtttcccaagcgatagaatcctcatagaatttctgcatttgccaaccacgataatcacttcttaccggtttcggtgctgtcatgacaccgcggagatattcacggaaataagtagccagcccctctttatggtcaacacgattgtaagtcagtttcaacggaagagcctgcaaagaatcacattctgcatctgtgatatatccggctttacgcatctgctcgagcaccacattacgacggccacgggaacgttcgttgaaacgaaccggattgtaaagtgacggattcttacacatacccaccaatgtagctgcttcttcaatcttcaagtccttcggttcacagccaaaataggtatatgcagcagttttgataccaacagcattattcagaaaatcaaatttattgagatacatactcaatatttcctctttggtgtagtaacgttcaagtttcaccgcaatcacccattcaatcggtttttggaaaagacgttgaagtgtatttctcgccacattttctgtaaacaactgtttagctagctgttgtgacaaggtactacccccacctgcatttttctgaaacatcaaaccacgtttcacaaacgcacggaacaacgctttggcatcaatacccgaatgctcgacaaaacgaacatcttccgttgcaataagagcattgataatactgggtgacaaatccttgtaagccgtgtacacccggttttccttgctgtaagaccatgtaccaagcactttctcatcttcagaaaaaatctctgttgcaaatttatagctcgggttctcgagttcctctacaggaggcatatagccaatccaaccctttgaaatggagacaaagactataacaatagccaatactatgactgccaagaatatccaaagagcttttattatttttcgaatcatgttttttctcgcttaaaatgacgcatttaattaagatgcaaaggtagataaaatccgctattcagccaacgagtttgattataatttctattttgttaaaatatatagcgatactcctaacaaatagcatgaaacaaaacaaaaaagagcatttttcaagaaagcaaccctcttattatatctaaacacaaacaggcgggaaaaatcccgcctgttattcattcataaatatacctatttataagataatcaattacaaggttgctgcctgcacacctaccactccggcaatcgcaccggcaacagcaataatcactttcaaaataatactccacgtttttttcatagacatttctctttttaaattaaacactaaatgaacactctaaccgtcagctattaatcaacaagacattaagctgcgggatccggtgcctctccgctaccgccaccttcatctccgccaccttcgccttcatccggtttctcgggatcttccggagatacagtaacgctaattttcttcagatattcatccagactgatcagatctaacttctcatctgcacgggtagcagttttggtgacacgcaactctttattagcttggaaaaagatacgaacactatccacactcttagcattaatatccttcgccaactccgcaccttttgaacgggcagtcaacataaacacacccaaaccttcgatattcacagacttaccttccaataactgctccttcattttttccacaaaattctggattacactcttgatgtcaccgatagacagcgaagaacgatcctgcattttctgtgcaatatatttcaggttgacggactgacctaaagtgatcagatgcggataatatctcttaggagaattgggaacacgcggatctgttggccgcgtaatgactttgtaaattacactcatactacgtttttttaaagatttaaattcaagtttatttattcacgttttgttgatcaacaatgcaaaggtgaaacttttattccggatagaaaagaaaaaagctccttgcggagctattttcatttacctaagtatataatagactataaatcaacaacataatcagcatcctataatctcccagtccccaatcgtacaccgttcgctatcaaaacagacagccacctttacgacaggcaatccacataaagcaaagcgttccggataattcttcaaatcaatttgctccatcgcttcacccgcacttttatccaatttcagttccatcacatacaatgtagtcttcgtacgaagtactatatctacccgtccacgaggagtacgaacctccacatccacgtaatatcccaacaaactgaatatgatataaaagacctgctgatagtgtccttcgaaccttgtattgtcgcagtaaggaatcgtagacagaaattcctgcaaacggtgtaaagcagcatccatatcaccattctgaatatcataaaaaagataagctaccatggtagttgcttcaggtgtcttgttatttacataataaggaagaaggctctccataagtcccagccttacttctttattgggaatatccagcgtataaaggtctagcatcttattataatccttaatagtgatatacccactttggtacaataaaggtactgcatcagtcatcgtttcagtaggagcatcgaaaactgaagatttcagctgtctacgtccaatttcggaaggtttcacaccgaatttatccaacatcttaaccagatatgtaggagtaccgctaccaaaccaataagatccaaattttccatcagcaaaagcatttagcaaactaaaaggattatatatatcgggcgaaggagatgtgaaatgataaccatcataattttctttcaatttcatcaaagcctcttcaggtgttatctccaatttctttgccaatcctcccaaatcatccttcatttgcaaacgtatctcatcttcactaattccacagatagcagcgtatggctcatccatactaatattctttatattattcaactcactaaaaatacttagttgggagaatttggtaataccagtcagaaatacatatcgcaaataaggatcacaagcttttaacgggctgtagaagttacgcatgatgttacgcaatacatccagattttcccgttcatgtaccacatcaagcaaaggagcatcatattcatcaataagcacaaccactttctttccggtctgctcataggcacgttttatcagtcccatcaaacgctgattgggattaacctcctcctccagccgtccataaatctgttcataaccatatagtttcagattcaattcttggagcaactgttcactatccgcatgtttggcggtactcatatcgaagtgaagtaccggatattccgtccactccttctccagtttctccatagccaatccatgaaacagctccttacgtccggaaaaatagctatgcagcgtggaagtaagtaatgacttaccaaaacgtcgtggacggctcaaaaacatatagctggaagccgaatgagtcatccggtaaacatactccgtcttatcaacatagaggtaattcccctcccgtatcttcgagaatgtctgtatcccgataggatataatctttgcaaatcttccatatcaatcatatttttcacatacttaagcatttataatctcccagcccccaattgtacaccgttcgctatcaaaactgacagccacctttacgacaggcaatccacataaagcaaagcgttccggataattcttcaaatcaatttgctccatcgcttcacccgcacttttatccagtttcagttccatcacatacaatgtagtcttcgtacgaagtactatatctacccgtccacgaggagtacgaacttccacatccacataataccctaataaactaaatatgatataaaaaacctgctgatagtgtccttcatatttcgtattatcgcattgcggtatagtggacaggaacgtttgcaaacggcgtaatgcagtatccatatccccattacggatatcacgggaaagatacgccaccattgtcgtggtttccggagctttactaccgacataatgtggaagaagacttttcatcaggcctattctcacttccttattaggaatattcaatgtatacaagtctaattcctcatcataattcttaatagtgatatagccactttgatatagcagcgggataatacttgtcatcctttctgttggtgcatcaaaatcctcgaccgaaaccctattatttccaatttcggaaggttctacgccaaacttctccaacatatttatcagatatgtaggcgtaccgctaccaaaccaataagatccaaattttccatctgcaaaagcatttagcaaactgaaaggattatatatatcgggcgaaggagatgtgaaatgataaccatcataattttctttcaatttcatcaaagcctcttcaggtgttatctccaatttctttgccaatccttccaaatcatccttcatttgcaaacgtatctcatcttcactaattccacagataacagcgtatggctcatccatactaatattctttatattattcaactcactaaaaatacttaattgtgagaatttagtaataccagtcagaaatacataacgcaaataaggatcacaagcttttaacggactgtagaagttacgcatgatgttacgcaatacatccagattttcccgttcatgtaccacatcaagcaaaggagcatcatattcatcaataagcacaaccaccttcttacctgtttgctcataagcacgcttaataagattaactaagcgtagattggcatccccctctactgcgttaatagcaaacgtacgttcatattcagcaagcataaaatcaagaagacgttccaatcctcctttatccacatgtttcgccatactcatatcaaagtgaagcaccggatattccgtccactccttctccagtttctccatagccaatccatgaaacagatccttacgaccggagaaatagctatgcagcgtagaagtaagtaatgacttaccaaaacgtcgtggacggctcaaaaacatatagctggaagccgaatgagtcatccggtaaacatattccgttttatcaatatagaggtaattcccctcccgtatcttcgagaatgtctgtatcccgataggatatagtctttgcaaatcttccatatcaatcatatttttcacaaagctactaaaaaatatccatcagtcattgctttacaaaaaaaatatcaactatcttcacagacggttgatataatagaaatcacatcggatttacaccgacatgagggcgttgaccaagaatacaccgctgtgtatttcctgaccacaaaatgtaggggtcttcatgtgtgtagcatgaagttagggacctacatgttccatctcactttcgtgtaaagtattaaaagtactctatgacattattaacttaaaaaatatcggtcattaatggctttagtcttccttggcgtgagattgttctccatatccataaccgtagccatatcgcttaccatagccataatacttgccatatttgccataaccgtaataataaccgtactttcttttcttcagatccaaaccattgattacagtacacaggctaggtaatttatctttttcagcaagttcgttgatcaaagtatattcattcttgtgagtatagtctgcgcgacaaacataaactgatagatcagccacacgtccaattagcaaggtatcggtaaccatgccaacaggagcggtatccagaatcacataatcaaaattcttcttgagtgtttcaatcgctttatccaagccatcacgggccaataattcagtcggattaggaggaactgttccaccaggaagaatataaagattcttactgacatcggaaagctgtactaaatccatcaaattcttttccggattggccaaatattgagttataccaacttcctttctcggaatattaaaaaccttattcaaaccaggcttacgaatatcaagacctacgatgactactttcttccctaataaagaaagactaatagcaagattagcagaaatgaaagatttgccctcaccactaaccgtagaagtaaccagaatcaccttcttatcattttcaagcataaactgaagattcgttcggatattacggaaggtttcgctcatcaggttgttttgattctcaaacacagcaatagctccctgcttttcatctgtcaatgggatatcaccgacaataggtacattagtccttaattccgcaacactattacaaatataactttttaagtacctgagcaacaaaaagttgctcaggaatttgccatgtcagatttttcacctatcttagtgttgcaaatcaaaatatgtatcaaacccgacagacatggcaaaggtagcaattaaatccgagaaactcactccttttggaggaatattttcaataatggagcaatttgactccagactctcatctgtaatcgactcaaccctcggtatgagatgcaggctgtatggttatcaatacagcgaaatcatccgttcgcttatgagcgtttatttttgtggcggctcatgcatcgaggatgtcaccactcatctgatgtaccacctttcgcttcatccgacacttcgcacatgcagtgccgacacgattcttagagccataaaggaactgacccaggataacatttcctacacatccgacactggcaagacctacgacttcaacacggcagacaagctgaatacactgctcctcaattgcctattgtccacagggcagctgaaagagggcgaggggtatgacgttgacttcgaccaccagttcatagaggctgagaagtttgatgcgaagcctacatacaagaagttccttggttatcgccctggcgtggcggttattggcaacttgattgtcggcattgagaacagcgacggcaacacaaatgtccgtttccaccagaaggacacgctgaagaggttctttgaaaggtttgaacaaaacaagcttattatcaaccgtttcagagctgattgcggctcgtgttctgaagagatagtggaagagattgctaaacactgcaagaccttctatatccgtgctaaccgatgcagttcgctctacaatgacatctttgccctcagaggttggaagaaagtggaattgggcggcattgagtttgagctggcctccattctcatcgagaaatggaaagggaaggcataccgtcttgtgattcaaagacagaagcggatagacggcgaactcgacctgtgggaaggagaatacacctaccgctgcatccttacaaatgactacgagtcttccgagaaagagattgtcgaattctataacctccgtggagggaaggaacgcatcttcgatgatatgaataacggattcggctggaacaggcttccaaaatcctttatgggagaaaacacggtgtttcttctgcttatggcactcatacgcaacttctataaattcatcatggcgaggcttgacgtgaagaggttcggactcaaagcaacaagccgcatcaagacgtttgtctttaagttcatctctgtgccagccaaatgggtcaggacatcaaggaagtatgtgctgaatatctattcatgcaacaatgcttatgccaatgtgttccagaatgactttggataacaccgacaacttatagtcgtgattttgcgtattgcctcaagtcgcatggtggggtaaggggcatttatatgtctttatggtgacattcgatgcactgtgccccctttttactaacgatgcagattcttttcgcttctgtatcatattaggcgcgtagttgcggatttgaggttagtcagtttttctacatcagaacgtccctcaatcttgaatttggtcaattcaagcaaataaataactcctaccggaattccgactcctaataccaaagcaatcaaataaatcattttgctcttgggagacaccgggcgattgtcagcaattgcgtcatcaatgattcgtgcattattagcagtagcagctaacgcaatcgcattttcttcacgcttctgaagaagcatcagataaagtccagctttgatttcctgctgtcgagcaatactcacaaactgacgttcctgagacggtgcgtcactgatacggcgagagtaacggttagcttctcggtcaaggtcggttttcgtaatcagcaaacctttcaatgtagcttccaaagtagtctgcacattcactttcatcgcacgaatacttgtgtccaaattcacaatggttgggttactttccgtagaagtgcgcaacaaccgctgacgttcaatcaacatttcattgtagcgctcaatggcacccgtcaaagccacatcccgcaaaccaatattggcgggaagaacttcatactcattacgattgatatagttctgaaggtcctttgtcaaattaatctgcgtctggttctccacacgcttcttctcatattcagcgttacccgtcaaagcaatttgagcctcactgcctaaatcggtaatacccgcattccgcttgaaaacttccaaatgttcttccgtgctacctaattccttcgagatgataccaatacgctcgtctataaactccgccgttttttgagcaaccacattcttatcgtcattcgtattgcggttatacatctcaagcaacgtattgatataatcctttccacgttgcagattagaatttttcaatgatatgactgctacggaagtggtcttcgaagtaggttctatggacatttccccacaatagcccttcgccacggacatcggattgttaacggtagctataatatgacgtactgtttccaccggatccgcatccgctttcgtcttacctttcgggaagagaagagaatctggagtctcgaagaatgcaagcgtaccttcatccatcggaaatatggcaggaagcttatcaaagtgtttctgatattcggactcaccaatctttacattcacatcaagactcccctgtggctgcaaaaccatatcaataatcatcggcttctctaaaccttctgcttcttgaggagtaatacttaccgtcacaggagactttttatacaatcctttggaaggaaactcatcttcatccttataagttatatacaaattcaactgattcaccacctctttagctaaagttttcgaacgaagtacctccatctcgttatcaaagttttgagaagcagaaaacaagccccccatccctagattctccagttcggacaattggctggaagccccgcctttcttttcatccttaatcagaaccgtagctgaaatattataaatcggagttgccatttttagataaatccaagcaccaatcagacagacgaccactgttgatacaatccaaggccaatgaatcaaatatttaaaaagaatctgctgaatatctattttttcttctttctcctcttgcagattgatagttttattttcttctttcataactactatatatttacttcaatatattaaacaaaagactagcaagagacactaaaatagaagtagccgagaaccacagactcgtactgtttccaatatcggaatttcgcgctttagccttattaggggttacgtaaacaacatcattctgttgtaaccaataataaggagacaaaatcgtttcaaccttattcaaatccaacgttataatttgttgctttccagtggcatcctcacgaatcaatttcacattgtcacgaagtccatagacagtcatatctcccgccatagcaagtgcttctagcaagtttactttttcattggaaatggtaaatgttcccggacgagtcacctctcctatcacagaaatcttgtaattcaccatacgaaccgttacaatcggtttttccttcagaaaaggttccagcttactgataattaaatgttctgcttcctttttagtcaatccccccagttctaattcacctagtacaggaaaagatatttttccttcattatccaccaagtaaggctgcaacaccgcttgagtggtcacataagaagaagaagtacttgccgctatactgctgggactagcaaccgtcagattaaacggtacggccagctccggactagtgcatgagacaacaatcgtcagcaaatccttcggcataattttcgcatcatacaatttttcctgactagcagatggacccaacgcttccgtattctgcaaataaggcactttcttatatgactggcaagctgccaataaaaaagggaataataacaaccataatttttttttattcaatcttttcataacttctaatttttaaattaacgccctttaattcctaagttttatttttttaatatgcctctttttctccatgtatagcattatacaccgtcttatacatgatatataaatccaataaaaaagtccaatgttctatataccagatatcacgctgcacacgcccctccatctgccagagctccttcgtctcaccgcgaaagcctgtcacctgagcccagccagttattccaggtttaacgaagtgacgaaccataaacttgtttatcagattagaatattcctccgtatgctttaacatgtgaggacggggacctacaatagacatatcccctttcaatacattgataaattgaggcaattcgtccacactcgtctttctcattatctctccgatacgtgttttacgaggatcattttccgtagcctgaagagtatcacattgcgtattaaccttcattgaacgaaacttgtaacaccagaactcacgcccatcttcaccactacgtttctgcttaaaaaagacaggaccgggagaacttaacttgatcgcgactccaaagaatatataaacgaacggaaaaaccgtaataagaaataaccctgaacaaacaacatcaaaagcacgcttgataatacggttctccagtgattccaatggctcacaacgaatagaaagtacaggaacattccccaataattcaaaatgcattctacgcttcaaataattacggacattaggaacactaaaaaaacgaaccagatggttttcacagtaattaatgatgggaacaatctccgcactgcgcacagaaggaaggctacaataaagctgattaatctctcccgcatgtttttctaaaaaaacacttacttcattgggttgtcccaaatatggaacatcctgcggataacagtccgaaggaaaatcctcgaaataacccattacacgataaccagacgtaggatcatccgtcatcgcatgataaagctcctgcatattctcatggctcccaaccaatactaccttgcggacatttcctccttttttccgataaagctccagaaagtgacgggaaattaggcggtagctgataatgacaattatcagtgtaacataaaacagtccgaaatagcgggaatgagaaaaatgaaaatgaaaaacaagcaacgcacaaaccgaaaaaaagacaaaaggaaccatgttacgtaaaacacggatcatgatctgttcaggacgcaccacaggacgatgaagaataacacctgaatgcatgttacaaagtaaatagcacagagtgataagagtcattccctgaaagatagaaccgcaatgaatacaccagaagcgggtacccagtaacaaattaaatccccataaaagcaggttcagcaaaataagatcccccaaaaggaccaaagattttaggactttgttgaaacgttggacttcttgcataaatgtttcctatgattgatgtaaattagccataatactatcgtctcaaattacaatagtaaaacttagggttttaagatattcaaatcaaatgcttacaataggcaaatattatcatgtcaaaaatggcttgtgcccctctttccacgattcatttgcaaaaatatcataatccaattttgtcacatcgccaataatctttgcaggaatgccacctactaccatattagtatgcacgctcttattcaccaccgcattaggagcaataattacgttgtcttctatgattacgggaccttgtatcacgacacccgaacctatatagacattattacctatcctaggacattccttataaggaccttgccccacaatcgacacattgttacctattttacaattcttaccaaagacaactttgggatttatcagtacccctatgccagcatggttgaaaaagctccctctcccaattgacattttataactaacagaacagttatacattagaaaagtaataagctgcaataattttggtaaaaaaggaatatgatgcaaatacagccaacgggcaatcctatataatcttatcgcatttatcatctctatttccccctacttctaaagtatctgtcatatccttcaagcaaagctttactagtatgttcccatcccaattcattgattacacgattacgcccatactcacccatccatttacgtttttctggattatcaagcaattctagaattttccttgccatatcattcgcattattgtgctcggcataaagtgaagcatcctgtgctgaatatcgaccttcagtcagatcaaactgcactaaaggtttacccaatgccatatattcaagcaccttattcattgtactcttgtcattcatggcattgtactcgtcgcagttaacacacacatcagcagtattcagatagtcaagtaatttctgatccggtacgcgacctgtaaattcgacaatatcatcaagtcccatttcatgacagagctttttcatacgttccaagtcaggaccgcctccaacaattccccaaaacacatcgttacgttctggtaactccttgacatattttgcagctttcagtaaatactcaatgccttcctgctgtccaatcacacccagataacccaccatgaatttcttcccacgttttatttctgatttcggttcttgtatcttcaaccgctccagtttcggaccactacgcaaaacaaatacatcttccgctttcatccccccacgttcaatggctattttcttatagctttcattggtaacaaaagcaaatttgcaatgtttgtaagtttgacgttccagccatagctgacttttatagaacatacctgtagtctttccaaattttgcttcatataattctgggcaaatgtcgtgatgatcgaaaatatagtccactccctttttcttaaacagacgagcaatcatccaaatatcatcaggcggattacaaccatgaatgcaatcaaatccaacctctttgtaacacttcctagccaaacgatattcatgccacagagcagtcccatattctcgtgcatatcccaaagctccattgccatctttcggcaatttgtggcgataaacatgtactccttgtaaaaattcatattctttgtcataacctttaccaataggacaaatcactgacacagtatacccgtttgcagccagtgtagtagcttcttgccatacacgtgtatcgaagggaaccggtaggttctctacaacaatcaaaatttttctatccataagatataatgatattctataataaattgatactaattttgatatcgttacttttcgagtgacttctgatcctgattactttggatttctcttttataccatattgctccgatacaaaaatatcctctattcgtatttctccttcacacgactccaatgtaaatgcatcacatgtcaccctacgatctgacaccgatagttcataatcccttgctatcacgaaagatgccgtccaatcacaatctttatcgaaacggtcgttaatcagtagtaccccctcagatcgtccaaaacgaaatgtacgcgtgtgcaccacactacacaaccctgtgacactagccgtaagttcgtctacatcttcttggaacgaatacgacaacagtttcgtttccgccttcttaccccaaagaaaagcccccaaaacctgcgattgctcttccccattgatcatcaccgtattgtggtgatcagtccgacggaaaatatttctttcctctatatgacaatggtagatataagtacctggatcgatgaaaattctttttccgtctttcagtatctgaaaactcagtgcatccgcatgtccgtgagcggcaatagtgccaaatcccagtgccgcatggtcgatacctatcaatatacttccatcgctacttctcaaaaaagagttaccaccttcactaaaacaacggcttcgagaattgtcatatataggcaaagattttatccggtcaatcgactcagaactaaaccaccaacctacattttcggtcaccttttcaaaactatgatagcgcatccctaatactaatgaaagcaactgtaacacataattataatgatcggtatgtcctccaaccaagtccacaatcttcccctcatcattatctccaaattcacatactgcctgttcacaccaacaacagtgacttacaaactcacacatcctccctaaccattttttccatccatcaggcagacatacgccattatgtaacatacaacaccctacgataccgtaagcctccatgccaaatgtctggtaatgcagagacaattccttatttacgccatccttataattttgctttggcaattcctcagacagtatgccaacagctaatttctgccacgcctgatgatgaaaaacaaaccctgacagagcaatagcagctgcttctactaacaaatgattattagccgatgaaaagcgtgagtaatgattgcaaagataatccgtcatgtttacaatacccgtctccatattctccatcaattctccatatagaatatcaccttttttttgaagaaaactaagagcaatagtccactgaatacagcgaatagcaatctccatagcgcttgtccatgaaataccatgtaaaaaactattcttctcattccaatcgataaacaattcctctaacgagtcggcatactgccgatcaccactcacaaaataggcctttgccaacaaagcaaactgaaaatgccggttcagttcccaattggtacgtgcatctccaatatcatctcgttgcttatagttcagatagtagctaaactcgccatcccagcaattcttcgtttgaaaaccggcggcccaatccttcttataatagttataatcatacccaccgagcagatgaatggaagtattcagactataattacgattaccaaagtaaatccccagtgcatcacagtcaaacctcaatttttccagcgccttgttgaagcgaaaagaagacacagccaccttacaaccactaaatcttcttttctctttcatttgaatctttttctgctccaacctccagattacctcctgcaggttcatagctttcaggcgattcacataccaagcccatttgctcatttaaaactcagtctgtttaaaatcctccacatactccatatcctgtccctcattagtattaatattaccccaagaaagaccttcatattgaccattgtaatccacctctttccattggcgtaccaagtcaattataatcttatgcggataatttttcaacacatctgcaaaatccttctctttattagtgactaccaatacatcactgtttctgcacacaacatccaagtcatctgttacaaaatgctgcaaatgcggaatttttgccataataaagtccttgtttgtaccagtcaattcactcacttttacattacgatcgtaaatacggatattgaaccccttccccagtaagttttccaccacatccacgataggagagcatcgcaaatcatcggtgcccgccttgaaactcagtcccaagataccaatattacggtgtcctttgctcataatcgtctgcacagcattgcgcttctgtatctcgttgctttggaaaatactgttaataacaggcacatccacatacaaatcatgcgctagtgtcttcaacgccttcatatccttcggcagacaagagccaccatacgcaaatcccggtttaaaataatatggagaaatattcaactgtttatctttgcaaaaaatctccatcaccttatgtgaatcaatatccagtcctttacagatattacccacctcattaccaaacacaattttcaaagcatgatatgtattgttgacatacttcatcatctcagccacctttatatcagtgcaaataaactcagcgtgaatatctttatacatttcacggaacacttgctccgcgtattcagagtcagtgccaatcaaagtcaatggcgggttaaagtagtcctccacactcgtcccctcacgaagaaattctggattgctcactactgtgaagtgtattcccctttttaaaccactttcctgttcaataatctcacccaccttttggtttgtcccaggaagcacagtagaacgaatagcaatcaagtgcatgtttttgggagcattttcacccgcaaactttttctccaaagccttaccgatacgcccagctactgtatagatataatttaagttcaaatgcccttctttgctcgagggggtacccaccacaataaacgacacctctgtttgagcaacagcttcagcagctacagttgtagccgacatcaatcctttgtcgtgggcttccttacacaattcggcaataccttcctcaataatggtaggtttaccctcgttcatcagacgaaccttgttctcgtttacgtccacaccaatcaccttgtgaccaagcttggcacaacatgccgcgcctacgcatcctacgtagccgagaccaaaaatactaatgttcatgattatttgaattgaaatttatatattactaatgactaaagccagtttattgcgttttgtgtatttcaactctgcctcattgataagttggatattcacatctatattttttaaacccattttttcatctatcagactaaggattatattctgttccgattgtttaaaatccctatccggcacaatattcaatgtaacttttccaggttcattctgaataaactgtgcctttctaacattcggcacatccttaaaaataaacgtaagagcagcatcactataacgggttccatccttaccaacaatattggatgcagtacgcccttcaatactttctatcgttgcatcatacgaatgtaatggaaagcaatcttgctttagaacaatacaatctgttgttttatatcgtatgagtggaaacacatcattaataagcgatgttgaaatcacataatcatcataatattcttctataccataaccgggatcttcaaaatatccgtcatgatcaaaagattcctctaagcggatcgttcgctccgttgtaccataatgatcataaatttgagtattgaacaccttttcaatcaacatccgctgataatcatgcaatgtctccgaagaagtaaatgctaccggaatatgacattctaatcccttatcatgtaaaacaagagctaaattataaagcgaacttggatatccttctatcgctttggcatgatgttgctttatcaatcgataataagtcattgccgtatgttcatttatgttataactagaaagaaaaagcgtattactcacatgtactttaagcgatatatcacttctccccaagttcccacgcaaagaaaccattggttcaccatagttatacccacaacgtttccgataacaaacaaaataagcctgttctcgccataccgatgcccaatcttgaaacacggtgagcggggttcccgttgttccgcttgtatgattcttcaccaatcctcgttttgaacgagtcagtaactccttaccatgagctttcaacatatctttagtaagaatcggtaattttattatatcttccagatgttgtatttcgtcggctgacttaactccctctgccaaacatagtcttctataatattcagatctaaaatacacttttctgaatatttccaaaaatcgcctctcgttcctttcccttagttcttccggtgtcatatcatacatagcattaatttcatccatatatttatgaataaataaacgggtgcgcagaagatacttcaaagactcttcgacatatttctttatcataatcgtcggattttatttatatgaattttcatcaatactcctagacaaatacctcatctcaaaattgtatttatactaaagaatcgtacagtgtttgtaattgcttctgcacatagtctggtagatgatcctgaaccttacttaacgaatctttccccatacgcttcgccatagcctcatttgccatcaaattcgatattgcatggtaaatagcaattttatctcccggttctatgataaaaccattttcattattttttaaaatctcaggaataccacctactgtagtggaaattatcggtaaagaatagctcatggcttctaatactgatataggcaacccctcattataagagggcaggatataggcatccgcctgattgagcaaccgttctttctttataccactcacccaaccttgatatttggcaatatcgttcaaatttcgttctctaatgatagcttgtacttgctccacgtctccatcaccaccaaacaagaactcgagcttattaataaattcttcacgatgttcactcaaaacatccaatatatcataaatgcctttacgcttacccaaacgtccaaagaaaagtatgacaaacttatcattcttttttttgttaatatgaggaggagcgataacattcttgataaccaccacatttttgtgatgaattgtgttctcaaaccacaacttccaacttttactaagcgcaataatgcaatcgcacttgttcaaagttttgattacagctttcttatatttgatagtaaatatttgaaattcagcaccatgactgtgaaaaaccacttttttcccaaacagtttggctatataaataaagatacgtttgcgccaaaaactagcattacttgctccatgcacatgaacgatttctatttgaggtcgaaacagcatccatccgaaaaattgaaagaaagccctacataagataaaaagtttatttacttgtcctccatctaccacagtagtgacatgattaaatggcttgtaaaaagtgctatacacattttccacagccgccacgccaccatgtacaatacgataatcaatacctatagttaaaatattttccgcattcatactttacaataatctcaaattacagtataatttaattgtgataatatatctattgaaaaaataaaacaaaacattctcactctaccattcttgtttactataatgcaattaaagaaatacggcaaaggccctttcacccgttaattccgatgaacaaaaaaagtgaagaaatggaactttttctcactaacttttatttttcgtcttaatttaataaatatgggattccaattttgtaacttttttaattccaccaatgggcaattctatatattaaccaagaaatctatgaatttcttgcccactccttctatactaaaatgctttttcataacattcaaaccattttgaccgatttgcaaagcgttctgtggattttccaaataataaataatgccattagctatttcttccacacattcaggctgtactaaatatacactctccatatgctttacatacttacccacatcgctaacatttgttgctattactggatttcctgtagccaacgattctgacagtttgaaagggaaaccataattggaaaacttgctattttctctcgtcatagttaaaatatcacaatcaagcagcgtctcaacaagttccctatcagataccatacctttatattgaacatccggattatctttaacgagttctagtactttcatatctgacggttgccctttacctgtcattattaacctacaactatacccctttttctgcacaagtaaaaaagctttaagtaagtattccaccccgtctttcttagcaaatgttcctgaatacagaatagttggaggattactaaaaaactgcttcttcgttttttcaagaatgggtgtagaattaggtaaaatacacattttctgggggggatatgctttcaaattttgctctttcaatgcttctgaaattacaaaactaccatcactccatttataagcccttctactgacctttcctgtaagcaaaaaatgtatttttgtctttatggaattatttgttccttttgtattataatcggtctccacttgatcataaactatcttatagcctaaactataagcatacctaataataggataatcccaaaattctaccttagtatcacatacaaccacattctttttatctgaattaaaccatttttttaaaaagatcttaccttgatgataatattgaaagattttaccttcattcaacaaatatgatatatcaatataatcacaatctccatacatcccctttagtggattctgcgactttacctgatgacgcaagactaacacatgacactcaacgccttgaacattcatataatccaccatatacctgcgacgctttgttgtggccaatccataagggaataccactccactagccattacaatatttaactccatacttatattatctcaattaatgcttttcactactctacaaggaattccagctgccaccacatttgctggaatatctcttgttactatacttcctgctccaatcaacgaattttcaccaatgcaaacgcctttcagaacagtgacgttcatacccaaccacacattgtcttcgatgataataggagcatcttttcccgctctataatcatctgtatgcgcatcagtatccattatcaatgtatttgcaccacaacgaacattattgcctaatacaacagaagtggatgcccatattcttgtaccagaaaagccacaattatcaccaattttaattacagctcccttagttgtataaagcatgcaaggacaatagagtccaaccttattagatgtttttttggatagaaaataacatccacttcctatagatatttttccgttttgcaaacgtttaaaatgggaaaatccctgaaacttagtattcttaccaagctttatgtcccaccaccaagcccacaccttcatacacaaggtgtaatatttacgagacatccgataccacaattcattcatatagtgagcacgattttgtactaaatatccaattcctatcttttgcatacttcttgataaatatgaaacatcattctcgcattcgtctcgctatcatgccgttttgctgcttctttagatccattctctgataatattgtcaccaactcattatcatagaataattggcatatatattttgccaaatattcgtattcctcaaacctgtaaagaagtcctgtttttccatgctcaatcattgaaggaatacctccagcaatagaaccgatacatggcacacctaataattgcgcttcacctaaagagttgggcgaattttctactgaagaaggacatacaaatatgtgtgctttcagatattgttctatcatacccttttcatccaaaaaaccagtgaagtggattttatctcttaccttcaagttgtccattaaatgacagatataattaggataagctctaaactttagtttatctttcaatgtcttacgcaatgtataatcattgcctgccacatatacttccacatccgggaaatctctcaaaacaatcggtaatgcttcaatcactttttgtatgcccttcagcggtgaagccgcttgacttaaaaaaatccgatatttttgacatttatcatattgccatgtattacataaatagaatgaacttctaagattttcattgcaaaaatgatagtgcgctctaggattaacagaccaaacatgagttttgtcccaatcagttctgcctataacatgcatacaacgattgaaatactccttttccaattcagctcgtatatgcattgacttttgcatttgcgtgacggaagtcttaaaacaatcatacaatgtacgatattttcttagcatatccatctgaataccaccaagattataacgttcaataccacttacgactccttgtaaagaaatgcaaacattgctactaccacaaactctcatataggcaagcccatgcgaaaactccgtaccatgaatatggactacatcaggacaaaaatcattattaatttctttccaaaaagtttctaactttttattatacgaagttgacggatttcccggaatacaataataagtaacattcttgatatccctctttatcagttgttttgttcctgtatacaaagtagcaatgccaaattgcaaatcaggatacatactacttatagatataagcatggatttcatccatcctcccaactgtggttcaggaatatttaaagcattacaaatatcaggaaaagccaatgagtttgtaatccaaagtattttcattgtttaaaatattaaatccatctaggtgcttcaaaaacagagatatagtccatccatcgttcatacaaataatgatgcatattattccatgatgaccaaacacaataaaatattagaatcgaaaaggctaatgaacgaattctaaccatcgtctttgttctttcagttctcaaagacatgacgacaaaaggtaaaaccaacaaaagataataatacatgaattctcccattctcgcaacattactaggcaaataactgcttaacaataaaccaacataccacatgatagaaaaaaactttaaaggttgtggcatctgatgataataatagcaaacagcagttattatcatactgtagcatgatatctcaaaaaaagaattattattaaattctgttccaatctgttctatataaccttctacattattcaacatcatttcatcagaaaacatagtcatataaacttgtagaactgatatatcaataaagattttaccaatataaaatatattgcatataatagctagcattaaccaccattttccgttgtatacatgagaccaaagataaatgggtaatattaagaaggctatatatgcggatgagtgacattgagcacctacatataccaacacaatagaaattacatatttcgtgtatgactttctgacaaaaggaatacgaactggaattttaattttctctagcaataccaacactgataatatggcaaacattaacgaccaacattgccggtttgaattaatgaacaacaaaccatagtctgttcgcagcataaacaaaaaaattgtcacccaataatattgagctggtacataccatcgcattaaataatacaacaataacaaaaataaggctgttgtcaacattaaccaaccaaaaaaagtaataggtttgaataatttcagcaagtacataaagaaaggctcaatatcccgtcctcctgtaccagcgtcccaaatactagcattcaaattagcatacttccaacggccaatattaggtgtccaatcttgtactaattcatattgaaatcctaacaatataaacaacaaaaacaaggatattcttaaacctaagactttgttttgagctaataacggaatcaggatagcaagtatagttataaaatagaaatacatttcttatcaataagcactcacaatgctaattgcatcaataaagataccataaacactttaagttatatttttggttaataattatgttcctttgcaatcttctccataatataaatataatacatagaaaaaggcaacaattccttttgataagataaccacaaaaattatctacgtacaatttttttaatcacttttagtccttcatttccaacaatagaagatactacagcttttattttatcccctgacttaacaattttatttttccctataaattcgctcattgccacaacttcgtctacttcttctgtgaatacttcaaataaaattggccgaaaattctcgtttataaactcatttttcacattggaaaactcctctttattcttcgcactgatatatttaaacccacagttttcagcccatccctttgcattgccattatgaccatttgcagaaataaaattgtcaacattaacattatccttccatttttttgtcattattttaaactctgcccctccgttattattcacaagtaatattctgacattgtttttaatgtgtctaatgccaagcgcattcatatcataaaagaatgcaagatctccggtcacaatgaaacaaaattcattggtattcatgctttcaccaatcagcatagaattgcagccgtcaattccaaaggctgccacatttgcataaccctgaatacttgtatttaaaggaaaatagctccaactacgaaggctattaagtatagcaaaattcattatactgttctgaggaatatccttgtaaagttgttgagcgacgtataaattagaaaaaggcacttctacattgtagttcattgtactgttcatatttttccactcttcatagtaagaatggtcaacctgcatatcttttttcatacgattaaagaagtagaaagcaggacattcaaaaattttatttaaacgattatatgtattaacaacgttcccatcttcacacacacgccaatgctcagtattctttgtgagattcaatgcattgtaaatggaataatcacctgtctgaccaccgattgtaattattatatcgggattcaagtgtttcaacccaccacacgaaacaagcaaattaccttgaatagaatatataccatgataatttgacagatgattcacatacactacaacattataacctgtacaaaaattatccaatgcatccttttgccgttgcgtaaacggacgatgctctcctattattacaagtacacgcttgccgcctaaatctacatccgaccattcatcccatgccatatatcttttaattgtacgtattacaggtaattcaacctgttcaaactgtccttgttgtacatccacaatacgaatattcagctgtatcggtcccggattacgatgggtaagttccaacattgcctctcttgcactattgatacactgcattctcgtattatcatccgtcactggtggcaagtcaaaactgcgttttacagagtctacaggcaacgacatttggtcgggagcttgcatataatcttgatactggaaacgctccaacttggacgtagtgattgccaaaataggcgcatgcttatagaaagcttccgttaatcccggaatgtagtttcttgtagcttgtgcacttgtacaagaaacagctacgagttcacccgtttgcagatatattccgatggcaaaatacatagcacttcgttcgtcgggaacagaatagcaatgaaaatacgaatcgtcttgtacagcttgcactatgggaatgtttgtaccaccaggatttaaaactatatgatggatgttatattccttcaaaagagaaataacaatacgaacattttcttgagttgtatacatatatctaacattataattttagaacgaatattttacatcatcataagtgagaacgccagcaccaccagtcatatatatcatgtctcccatgatagagcgccccatatcactgacaagatatacagccatgtttgctatttcttccggcataatataacgtccgagtggtaaacgttcaagccacatattgctctgtccgtcttttatcatcattggtgtagccgttggtcctggtgctatgccgtttacggttatgccatatttagccaaagtttttgctaatcccaatgtcaatccgcgaattccccatttacttactgtataagcggaatctgccggacggatacacgaagcagatgcgatattcaaaatgttacctttgatgttgttagcaacgaagtatttacccaacatttgcgaaaggaagaatacacctttgaggtttgtgtcaagcactttgtcatattcttcctcagtcgcatcgggcattcccttgtagttaactcctgcattgttgacaagtatgtctattccgttaatccctgcgactttaacttcactaagaataccatcaaatgttttttcaaaagtaggaacctgtgtattattcaatacgcatccaaaaactgtagcttcggagcattctatcttcaaccgatttattgccgcattaatacgttctttgctacgtccagttataatcacagctgcaccagcattaatatatgcttttgctatagcataaccaataccacttgttcctcctgtaaccagagcacaacgcccattcagaagttcattaggtggtagtaaagctatctttaccgtaatattagttattggacgatggtcaaacaataatttgaaaaacctttttattactaaactaaacttcatgaattatgtgttgctaagaatgtttggtcaaaaagttttcgcaacgcttgaccataataattttgttcaaaatagggtgacatcttatggctcaaactcatgtcattacatatctcctcggctatatgatatgcatcgtctaaatcttctgccacatatacataaccatcataaacccccttaaaccagtcagcaccagtcaccaccttatgatcatttgacttgatgatgactactggagttccagcacaaagcgaaaatatcgtaccgtggtaacgatctgtaatagtaaccttaaacgttgagtatttttctatctcgttctcaatatactgttgaagattggcgcgtatattctgaatactagctttgctttgtgtgtctcccataacaacgggagcgattagctgcaactgctcacgcaattttatcaaatcagtttcaggatagaacttctccccatcgtcacgtcgacaaagaaatattttatcacgttgattgtcgtaatcaaaacttccaatcaatgatgtcacaatgtctggataagcaagcaccttcagatttggaaacatctgtttcgcctgtccatacgaaatcatatcacgagccaagaataacatattccgacaaccgttataactttgggctgttcgtgctctgttcttctcttctttaaaaaaaatagtttgtggcatcatgagtacttttgcatctggaatattatcagctatcagtcgatgcattaattcatgatttccacccaaatcttgcgtggtataaccactttggaaaagtatcacatcgtcaggtgtataatttcgttttagcatctctacaaaaccaagacgcggattcacgactgtatctgattcagacttgccaatttcatagtcgttacaatatttgtcaagccatcgacaaatacaataatgttgcgccaaatcacccaaattgcaatgtgccgttactccaagataaaaaattcgtttctttcctttagttctttgcaaaaaacaaacaaactgcgcaaagtcttttctttgcattacttcagctcttctatctacaaaatattgtttaataggatgaccaattggagcaactagtcgatgtaataatgattttttctttgccatattagatatgaaataacctatagaatctacgtttccaaacaaaaagtttatcaataaagttaagttgcatactcttaactatagcttcacctagagctttgtcttcgattacatacttaggatgcttgagtggaaatgtatattcaaatgtcttcttattaaatattcttttcaccgtaggaggtaaattttctaatgaaacttgattatgaacagcatcaggtgtcaggccaatattacaaatcaaatttcgagtaggaataattgctaactgattattcaataggcgtgccattctattaatagattcataatgttcttttcctgaatttaaatgccgcaaaactgtagattccatcatcttagtaaaatcaccattatattttaatgtatcaactacatatttatcattcaaaaaagcgtatgtcgaatcccacatatctatcgttcgtctccatgtagcccacccccaaattggtccatgttttgaaaagaaataatcaatatccaaatccaatttatccatatgacacataccggaaatcatgctaatacgcatatcattctcatatttatccaatagttctttgcaaaatggaaaaaaactttgtgaaggaacatcatcatcttcaaggatgatgcccttatctactattgagaacatccatttttgagatatatattctgacggatcacaaccataattcttttcctgatacattttgtacacttcacattcccaatcaatatcttccaccactttgcgacatgcatttatcccctcttcatcattgcgaccttttctaggaccgtcttgataaaggaaaagtttagttggacgtgctttctttatttgctcaaatacatgagctgtttgttctggacgtgcaaagaaaagtaggagcacagccacatctatttttgctgaatacataatagaattatttttacttattttaacactttcttctttagatagtatttaaacccagtgataatatgaaaagatgaaaaggatcttttcataataatagtatagtatctttctttaatcttatattttaaatttttcttttcaattttatccaaatcataaatacagtcaagagtcttacatatcatattttgagcatctagcaaattatttaacattgtgttgaaactttttctcatcctatgatgtgatccctttcgctccaaaatattatacctgatcccctttaaaattttggtattagaattgcatgtaacaggtaaaagcaactgtatattttgacctataaagcgagaactaaatattttcttatccttataatatttaaaaagagtacttactctaattacatggctacctgctggtagccatatatttgacgtacttagtaaaacatcttcaaaaatacaacattctttgttttttccagtataatatatatttcttttacttccagtattttcatccactattttcggaaaaaatcggacgcatgaacttttatcatcttgttctaatgcagtgatggcatcgaaaaatacattctcatcttcataccagtcatcaccgtccggccaaacaaggtatttcccacgaatatactgtaatcccttatttatagctgtgcatactccagcatttttttgtgatacacaaatatattcatatcctttctctaaaaaacgagattcatatatatcaatcacctcttttgtattatccgtacttccatcgtcaacacacacaatttccacattatcgtaagtttgtataaggatactatccaacaaacgaggcaaatatttacccacgttataacatggtattattacactgagtttaggttgcattattattttaaaatttgagaatcaaattaattaagcctaaaaattatcactcatctatcgaaatgcccttatgatatagcctctctcaattttgtccaatcctatataatagatggaaagtgacatagaagatactgcaagtatggatttcagaaatacgctaacaaaaatattatcaatttttattacataacgcaataaaatagataagccaacaataactacaaatattttgattgctggataaatagtacgtttaaaatattccaaatacgtaaaattcgtttgcttctgcagaatatggcaatgaaacagaattacgcaaacagaaagtattatattcacaactgtaatggaatacacagatgcaccatgtaaatacaacacatatgctacaggcaacaacataaacaatatcaaactaagaccgatttgattatttctgatgttacctgttgattgtatcaatgcatcaaaaccacattctaaagtataaatcaacgcattgatgagcataaagaaaatgaatccgctagcataagctggtggttccttcaaccaaagtacgagtatttcatctaatgatataatcaatgttgcaacaggaacaatcattaaaaaaaatgaatatctacagataacaaacacaagatggagagacctctctgcatttccacttccataatttttcataatctgcggaatggttgcctgtcccaaactgcgaactaacatttgcacatatccattcacctgcactgcaacactataggctgcattcattactgtgctaaaaaataagttaatgataattgatgacccttgtgactgtcccatacaagctgctgatcccagcattatccatccacagtaactaagtatctttttataatccttccaagattggttaaaacggaaacgtacaatttcctgctctttaatcctacaatatatcatattacacactggaactgttaaattgatcacacatataatcattgcatacatacgcaaacgattgcctatataatgggcaagaagaattaccatgaacaatttaagtaccatccgtcctatttcgcatacggctgtaaacaagaacttttctcttgccacaagcaaaccattacttggaactgcaataacagaaagcccacacgcaatcaaactccaatgaagaacaaatagtgcatctggtatttgcgccctgttaacattaagaaaattatcaacataccaacaaccaatagtttcaccgacaagcaataggaagatcgcaagtacaacatgtataataaatacagtgttatagactttatttagattacctttttccccctttcccatttctattgccaaaaagcggtaagaagttgatagcattgttgtgccaaaaaaattcattaaagaaaccacgcctccaactacagcatacaatccataatcagctacaccaagagctaataatatgacacgacttgtatacaatcctatcaatacactgaatactagtttgacataaagtatggcagtatttagtattatttttctgttatcgttcatttgcagattcaatagcaattattcaatagtttcactttcaagaatcagttcataagtagcataactataaggcttaactttatcagctttacctttaaacgtaaatattggctgatttgtatgctgtgtcttgcataattcaaaatactcacttagaaaattagtcgctttccgcaatttgttgtttccctctgtttctatagatcgaatgtaattcacgaaatcatcattactacaaaagattttcctaaagggaatatcgctattaaaaatgaacttgatagtatgagaatctatcatttgatgcgaaaccatattgtaaatatatctttgaggctcgcgatacattgactctgtaagacttctgattgcttctggcattagtatatatccatcagcttcggaagtcttgggagctatgtcttttatacatgccaaaaataggtcatatatatctattgggttaagtttaccttctttgaaaagcgcaatacctctctgtagtcgaataagacaaatgtctgacagttctgaatctgtaaatacacaatcatctgcccttaactctttgttactaatttgagaagataatactttttgcagaaaggcagttgtagcagtcagatcatcttcacattccagtaccttttttatgtaattcttatattcctctttactcaaaaaatcaaacttcttttcccattcaccccatgagtaatagtaaagataacgacaaaaaatagagaaaagttcttcgtcatgagtatatttataacagagaatgcctatcttcaaatactctgcaagttgttcctgtgtattctgattatctttaatcatcagaaggtagtctcggatatcagtattgatataacgcccttcccactgtttaaacaattgtttaacttcggcatctttaatatttttctttagcaacctatctaaatcttcgcaatatactttatagtattccatattaaagaaataagtgtcgaaacaattcttccaataaacatgaagataaccctttttattcatactttctagatcgccagaagtatgttgaggaaacatgagtcgcagtgcatcaaaatatggttgtttcatatgtttttcatccgccttcaatatgtatatatttctgtaatcataagcaaaatcagaaactatatcaaaaaaatcttttaacttcaagcgttcgtaaatattgggctctgcatattttaaaagtgatacaataaagaaatcactaaatttaacatttttctgaaggggtagatatgatgcacagaaagcactcatgaatcgtttaacatcacgcatagttggcaaatagttctctgctaatccaactacatgcaaaaaagattgttctatatcttgttcagtaagattagtgataaatccctctctaaagagacgcttaagctcataaaataaaaatgatgatcgttggttgttaagactttcaggaagaggtagttccatattaaagtatttatctgtaaaatctcgcccttccggacaacatactacacttccaagaacggtgtttacatactgcttatcatatgctgttacaaatactgtattttgaaatgaagcattcttattgataagcttcagtacctctaatatttcttcacctgtaaggcggtcaagatcgtctatgagaattacaatcttcttatttaaagctgctactgccttctgtatcttctctcgactatctgttgcatcattgatatgaatgatgcctaaaacttttgaccatattgtatcgcgtgccaatacgttcaaatcctccatatagtcttttacaaccgacttcattcctgtatgatattgggataattgcgtggctataatggataagaaatcagactgaatacaattaacattggcagatactcgtgcattaaaatcgataattataacatcgttatactgaagaagatcgtcccgcagaaaattaagcattgaagttttacctgcaccccaaggtgctgtaataccaatactgtaactatctgtaaactcccgttggcgaatagttgcagataatcgttttgcaaattcggcaaaatgatatctatcatattttacattgcaaactggttcatctcgataaaactggagaggtgatatttctgactgtagtggctccgttggttggggagaacattttaatgtacttaactgtccaccttttatttcagatatttttcctaaaataaatccaattaataacgcaaatgctaataattggaaacaatctatctgaccaatagcatttaaaaaagaaaaagaatcatcaacccatttgtaataagcataactaataaatataattgcaagaatagtatatgattgggaatcaatatgcttcttggagaaatgccagccataatacacaaagcccaaacagagcgtatatatcaagaattgcagacttctaccttcttttaattccaaaagattccacaagtcaataaatattttatcagctaacactcctccccaaagattgataaggcacacgcttatcaatactatataaaaacaagaaatgttctcacgcacacacttgatgcatttacggaaaaaatcaattacataataaacgaacaacatccccaaatgacataaagtggaaacaacgctctgaagccgttttcttatacaggatatcaaagaatggacttttttaatttattacttttctctcctcctatcggctccacatacccaaccggcatatccgcacaagcacaccccagcatattcaaccggacagcaatcttacttctaccatctatcgtaacaagttctcctataagccctgtcaagggacctttaataacacgcactttttcaccacgtgccaaaggagcactattcatacagattgcctcttcggaatagtcaagcataaaacggaaacgagccatttgttcatcaggaatgatagtcggactgctctcaccacgcattaccatataccgactaacggtagaaaaggaaagaacctctttacgttctttaggatcagcatgtacaaaaaccatcatcggaagcaacacggattcaaccactttacggcggtcgctccattgatggacttcttgctggaccggtacaaaattttcaatccccattttgtctaaacgttcggctactttcttctcatgatgcatacggaccagagcgacataccagcgtttagagtgtgctacgccttcccctgtcccaattttaggcccagcacttaaagtttctttcgttagaatcatacttttttaccccttaagtttccgttacttcttaggtaacggataaggtattcattcacaagaaaacagatgaaaataggaaaacatggacaagaaccgcctacagcaatgtttttctaacctatgcgaagggaaaaacatctttgaaaacagagtataggaatatcaggcatgataaaacaaaatcatcatgtccggatatattcttgttgtatatttcaacaaatcagaaaaaaaagaagattttacttgtttactatttgtatttttgcatatctttgcaccgaataattatccgttacctaagaagtaacagaaacatttcgcccttgatttctaatactttatcgtcaattatctacctaaacgatagtttttaatgtaagataaattccctttatttacctctgtacgttctcttagctcaaaaccttttaaatagatttgtgtggtttttattgatttgtgtcccaacgattcactaatcatttcaataggcactccacgatacttggctgtcgttgcccaggaatgacggagtgtgtaagaagaaacgggagaattcaaacgtagagctctcgccaaatccttcaaacaattattgaatctccgaagagcagactgatattcacggtatgccctttcatccttccgttttttattaccgcaaagtatgtcgaacagatagtccggacaatcaggaatgggttcctgattacttcggagttgattaatcattcctctggcagtatcaagcacttccacgctcatgggagttttcgtcttgattcgattatagcgtaatacactctgatctaaagccgatttttccagatgagctaaatcagcgaatgacattccacaaaactggaacatcagagcagcaatagtttgtgtacgacgtaaacgctccgatttgggatcctcatacaaaagtctgtgcaactcaccggcaggcaaagctttcttttgtcggacatccacacctgtatagacatcatgaaataatcggggaacataaggggcactccctgcttccactccccgattgtaaatgctacgaagcatacgcatatacgtagaaatcgtattaggcttcaaaccacactcataaagatactgaccataacgtcgtaaacgttctttggtgacctgcctgaacgacatattcaacgtaccacaaaacttactgaaagaataaagggcattcttatagacatgcgctgtagaatagcgcccctcctttcgtaaacgattgatgtagttctccccacatcgactgaatccatttttattcatcatttgcatcactagttattttatatatatactatttggcaagcgacaaaagaacaaatctttttgcaggttcaatttcactttccagatattatttttagaattaacacatgtttaaccaacgttaaaattagtagattatgaaaagtaaaaatgccaaaaaaggtagtaaaaacgacaaggtaaaaagaaatgtccaaacaatgaaaaaagctccagggaagcattcaaaggaagaaatcatcagtgaagaagagctggataacagaatagcaatcgacggagatatccgcctttatttcaccatgtatttaaaaatctttattgatggacatttccgccatcctaagaagaaaaagctgataaatctagcccaatatatctatgaccaaaaagtattatacatccacaaacatggcggctataagttaatggaacttagcagtatacatgctgaattgggtgcattgaaaaaacctgttgaggaagagtacatgaaagaaaaaaaggaaaaaagagaacaggctgaaaaggtcaaaagcaagtactaagaaaaaataatgggacagttggaatataaagcttaccttcgccgccgttttcaaccggtcgaaaactaacagattttctcttaaaaaaatagtgacggtatgctatcgttatagcgtcactataatgaaaggatagtgacgctatgacaacaacataccgtcactatctataagggaagatttacgctcaaacagaaatttatttttcaaaattaaaaacagaagaaaatgagacaaaaaatcaggaaaggcaagttagaagcttgcaaattagtatggaaaaaacgtattactgctgaaaaggggatttcggataaatgtgcggagagaattgtacaagagtgcattaaactaatagatcgcatgttgtatgggaatgtagtgatagctttttacaagcaggatggcacgttttgtctggaaagaggaacactggtaggatatgaaaaattcttccatagagaattcaatatcacagcaaaacaagagtctattctctattggagtgaagaacaaaaaggatggagaagatttatgatcgggaacctgatggagtggagagctattgtataagttagattaaaatatattgaacaatgaatatgattaataaagggataccttattttccgacaccggcaaacttctttgacgaagaagtgatggaactattagaagctaagtttggagtattagcttcttacattgtcatgcgattgctttgtaaaatatataaagagggatattatatctcttggggaaaggaacaaaacctgattttcgtccgtaaagtgggcggcgggatcaaagaggacatgatggaaaagattgtcgacctgttattggagaaaggatttttccataaagaaacctacgaaaaatacggcatactcacttcggaacagattcaaagggtgtggttcgaagccactacacggaggaaaatagatttctcccaactaccttatctattagagaccaagaagaaaaaagggatgcaaaaagaagagttgaacgcggaaaatgcagacatttttgaaactcaagaggaggtgagtcaagaaaatgcagacattttccgacaaactaaactaaaggaaactaaactaaatcatgaagaagaagaaaccaacgttgtttcgattgagattccggggtatgcctacaatctggctacacacaacatcgcaggattgatggagagtctggacaaccataaagtgactgaccagaaagagaaacagacgattctgcggttatcggactatggcaggaaaggcacccaggtgtggaaactgctctccaatacgacctggagcaaaatcggagcaccggggaaatatatcattgcagcgttagccggcggacggaaataaaccgactgattaaaagctgataaaaaaggtacgaaaaatctgtgcttttcacaaattcttcgtacctttacgctccggtaaaacaagttctatccacataaaagataacaaaatggaaaacagaagtttagtaaccattgccgaacattctaaagaaaaaatcctctacatgctcgaaatggcgaagcagtttgaaatgaaccccaatcgccggttattacaaggaaaggttgtagcaaccctgttctttgaaccttccacccgtacccgcttgagttttgaaacagctgccaaccgtctcggtgcacgagtaatcggattctctgaccccaaagctaccagctctgccaaaggagaaacacttaaagacacgatcatgatggtgagcaactatgcagatattatcgtcatgcgacatcatctcgaaggagctgcacggtatgccagcgaagtagccccggtgcctattgtcaacgcaggtgacggagccaaccagcacccgtcgcagacgatgctcgatctctactctatctacaagacacaaggaacgctggaaaatctgaacattttcctggtgggtgacttgaaatacggccgcaccgtacattctttgctgatggcgatgcgacacttcaatccaactttccacttcatcgctcccgaagagctgaaaatgccgcaagaatacaaactttactgtaaaacgcaccaaataaaatacgttgaacatacggattttaccgaagagattatcgctgacgccgatattctgtacatgacccgtgtgcaacgcgaacgtttcaccgacctgatggaatatgaacgggtgaagaatgtatatattctccgtaataaaatgctggagaacacacgtccgaacctgcgtatcctgcacccgcttccccgtgtcaacgaaattgcttacgatgtggatgacaatccgaaagcatattatttccaacaggcacaaaacggtctgtatgcccgcgaagcaatcctttgcgatgtattaggtatcacattagatgacgttaaaaacgatattttattatgagcgaaaataaacaagaattgcaagtagctgccctgaaaaacgggacagtgattgaccatataccatccgaaaagctctttaccgtagtgcaactgctcggtgtggaacagatgactagcaatatcactatcggattcaacctcgacagcaagaagctgggtaaaaaagggatcatcaagattgcagataaattcttctgcgacgaagagattaaccgtatttcagtagttgccccgcacgtcaaactgaatatcatccgcgattacgaagtagtggaaaagaaagaggtgaaaatgccggatgaacttcggggcatcgtgaaatgtgccaatccgaaatgtatcaccaacaacgaaccgatggccactatctttcatgtgatagacaaggataattgtatcgtaaagtgccattattgcgagaaagagcagaaacgtgaagagattacaatcctctgaataaacgtatagccccatgaaacaggactggaaaccaggaacgatgatctatccgctgccggctgtactggtcagctgcggaaaggaagaaagcgaatataatatgttcacagtagcatggacgggtacgatttgtacaaacccgcccatgtgttatatatccgtacgtccggaacgccattcttatgacattatcaaaaaaaacatggagtttgtcatcaacctgacaacgaaagatatggcttttgccaccgactggtgcggagttcgttcgggacgtgattatcataaatttgatgagatgaagctgacacccggacagtgtacggtggttagtgctccgttgattgaagaatctcctctttgcatcgaatgccgtgtgaaagaaatcatctctctcggctcacacgatatgtttatcgctgacgtagtaaatgtgcgtgcggacgaccggaacctgaatcctgaaaccggaaagctggaactggcagaagccaatccgctggtatatgtgcacggaggatattataatctgggagagaaaatcggtaaattcggttggagtgtagaaaagaagaaatcataaaaagtgcgatattgccatgaatatgctgcgtaaattcatccttcccggtttgttagctatagcctgcacggctgtcggccagaactataacgcagaaaaagtagaccgccccaatacaaaaaaaataaatatcggtatcaaggcgggattcaactcttccatgttcatggtgtctgaactgaaaattaaggatgtaactatcgatgaggtgcagaataactacaagataggttatttcggcgccctctttatgcgcatcaacatgaagaagcatttcattcagccggaagtgtcctataatgtaagcaaatgtgagatcactttcgataagctcggttcgcagcatcctgccatcgagcctgattatgcttccgtgcaatcggtgttgcacagtgtggatttccctattttatacggctataatgtggtgaaaaaagggccttacggaatgtctatcttcgcaggccccaaacttcgctacttatggggaaaacacaatgaaatcacttttaagaattttgaccaaaaagggattcacgaaaggctgtatccgttcaatgtcagtgcagtgatcggtgtaggcgtcaacatctcccgtatctttttcgatttccgctacgagcaaggcatcggaaatatctccaagtccatcatttacgacaatatcaattccgacggcagcacaggagtgagcaacattattttccgtcgccgtgacagcgcgttaagtttttcgctgggattcatcctttaagaataaaatatcattaaatccggctttttactaacatttttcttgtacttccttcattctttatttattttcattaactttgtgcgcttaaaataggtatctcgaattagaaatttaatcttacttataaaagaatgaaaagagacgacatcattttcgacatcatcgaaaaagagcatcaacgtcagttgaaaggaatcgagcttattgcatcagaaaattttgtgagtgaccaggttatgcaggcaatgggttcttgcctgactaacaagtacgcagaaggttatcccggcaaacgttattacggaggttgcgaagtagtagaccaaagcgaacaaatcgctatcgaccgcctgaaagaaatttttggcgcggaatgggcaaacgtacaaccacactcgggagcacaagctaatgctgctgttttcctcgcagttctgaatccgggcgacaaattcatgggattaaatcttgcacacggcggacacctttctcatggctcactggtaaacacttccggtatcatctatactccttgcgaatataacctgaatcaggaaactggacgcgttgactacgaccagatggaagaagtcgctctacgtgagaaaccgaaaatgattatcggtggtggttctgcatactctcgtgaatgggattacaaacgtatgcgtgaaatcgccgacaaagtaggcgctatcctgatgattgacatggctcaccctgccggcctgatcgctgccggagtgctcgaaaatccggttaaatatgcacatatcgtcacttctactacacataaaacacttcgcggacctcgtggtggtgtcatcatgatgggtaaggatttccccaatccgtggggaaagaccactccgaaaggtgagatcaagatgatgtctcaattactggattctgccgtattcccaggggttcaaggcggaccgttggaacatgtaattgctgctaaagcagttgctttcggtgaaatcctgcaacctgaatttaaggaatatgctaaacaagtacaaaagaacgctgctgtacttgcacaggctttgattgaccgtggctttactatcgtttccggtggtacagacaaccactctatgttggtcgacctgcgtagcaaatatcctgaactgacaggtaaagtggcagaaaaagcattggtttctgccgatattactgttaacaagaacatggttccgttcgacagccgttcagctttccagacttccggtatccgtttgggtactcctgctatcacaactcgtggtgcaaaagaagatttgatgctcgaaattgctgaaatgatcgagactgtattgtctaacgtagaaaatgaggaagttattgcacaagtacgtgcacgtgtcaatgagacaatgaagaaatatcctctttttgcttattaaaaaacgatttcaaagctaatagcttcactgttatcagctttatttcttatttataaggtctgctctttgtgaaaggagcaggctttttttatttattaacggtcccgcccgaaccatctgtccatattttcgtttttcttactataaaagaaatatatgatgtcatatatcactcatagcaaggacgaattcaaccgtacagtgtgcaagaagagaaaacagaagcgcactggactctatatacagtcatccccgtctttccacattttatttcatagggaaagacggggatttattttaccggcatcataccggaatatttttttgaggtatatattttagctcaatccttctatttctccatccacaatatcgatgtgcaatgcctgcggctccttgggtaatcccggcatacgaagaatttctccggcaatggctacaatcatttcagctccgttattgataacaatatctttaatatggaactcgaagttgtttaccgcaccataaatctttggatcggcagaaaatgaatattgtgttttcgcaatacaaaccggataatgagtaattcccattttctcgatcagtttgatacggttgcgggcaatactgctataagtaataacgctggctccgtaaatattagtggctaccttttcgatcttctgctgtatgctatcttcttctttataagtgtagcgtaaagattcggacggattgttctctatggtatctactaccagacgggccatatctactgctccctctcctccttcactgaacgcattgttaatggcgaaacccactcccaactgttcgcaatgttcgcgcagtaattccatttcttcatccgtatcggatgcaaacttattgaaagctacgatgatggtctgaccgaatgagcgaaggttacgaacgtgtttgtcgagattacgcaatccttctttcaagccttccatattcggctctttgatacggtcgagactgacacctccgtgcatctttaatccttgtgccgtagcgacaatcaccgtgagacgtggttggagtccgctcttgcggcatttgatattatagaatttttctgcaccgagatcggcaccgaatccggcttctgttattacataatcaccgaaagacattgccaatttagtggccagaatagagttacaaccatgtgcgatattagcaaacggaccaccatgtacaaaagcagcggttccttcggtagtctgcactaaattaggatggatagcatctttcaacaacacagtgatggctcctgccactcccaaatctttcacagtaaaaggttggtcgtcatacgtgaagcccaacaggatattttcaatacggcgacgcagatcactcacatctttagaaaggcaaagaattgccataatctccgaagcaggagtaatatcgaaaccggactcttgggtaaccccgttcgatttaggtccgaggccgacaacgatgctgcgcaacgaacggtcgttcacgtcaagcactctccgccaaagaatttctttcagtccaaagccctttgcctgattctgataaagataattgtcgagtaaagcagaaatcatgttatgagcagaagtgatggcatgaaaatcccctgtaaaatggaggttaattttgtccatcggaagcacttgtgcatatcccccaccggctgctcctcccttcattccgaaacatggaccgagagacggctcgcgaagagcgacaatcgcattctttccaattttattcaatcccaaagcgagaccgatagatactgtagttttgccaatgcccgctttggttgctgtgatagcagttaccagaatgagattgcttttcttcactttctcttcatcaatcagttgttcggggatctttgctatgtagcggccataattctccacttcctcacgagggattccgataccttcggcaacttgcttaatcttcttcagctcaatactgcgagctatttctatgtctgatttcatacagaatatgattagttttatttttgaaagaacaaaagtataacaaaaaagcgaaatagagaaatttaaagttcggcggatattatatctctatttttcataacacaacaaactctttttacgctataactgttgtaaatgacataacctaaaacaacaacttaattatggaatggattattaatcaactaagggtacatcctgaacttgctattttcctgacgctctttgccgggttctggcttggcagactcaaaatagggaaattctccttggggacagtcaccagcgttcttctggtcggagtattggtcggacaactgaatatcactgtagatggtccgatgaaagctgtgttctttctgcttttcttatttgccgttggctataaggtaggtccgcagtttttccgcggattgaagaaagacggcctgccacaagtgggatttgccgtactgatgtgtattgtcagtctggtagccccgtggatactggccaaaatcatgggatatcatgtaggagaagctgccggactgttggcaggctcacaaacaatatccgccgttatcggcgtggcaagcgatacgatcaaccagctgggaatcagcgatgcacagaaagccacgttcatcaatgcaattccggtagcgtatgccgtaacttatattttcggaacggccggttcggcgtggattctggcttctctcggccctaaaatgctgggtggactggataaggtgaaggccgactgcaaggaattggaggctcaaatgggaacatcggaagctgacgaacccggattttccccggctcttcgtccggttgtgttccgtgcttataaaatcaccaatgaatggtttgacaaaggaaagaaagtcagtgaactcgaagcttatctatgtaaaaatgataaacggctgtttgtagaacggattcgtcaaaaaagagtggtgaaggaagtagatccgaacctgattcttcataagaatgacgaagtggtacttagcggacgccgtgaatttgtgattggagaagaagactggatcggtccggaagtgattgatgcacaattactcgacttccctgcagaaactcttcctgtaatggtgacccaccggacttttgccggagaaacggtttccaaaatcagggcgcagaagtttatgcacggggttagtatccggaatatcaaacgtgccggaatcaatgttccggtattgcctaaaacaatcgtagattcgggagatattctcgaacttaccggtcttaaacatgaagtggaaagtgctgccaaacaaatgggctatattgaccggcctaccaaccagacggatatgatcttcgttggattgggtattttgctcggtggtcttttcggtgcactggctattcatctgggaggtgttcctatcagtctttctaccagtggcggcgcattgatagccggacttctgttcggttggctacgcagcaagcatcctactttcggaggtatccccgaaccttctttatgggtattgaataatgtaggactgaatatgtttatcgcagtggtcggtatcgccgcaggtcccagtttcattgccggattcaaggaagtaggcgtcagtctgtttatcgtcggcgcattggcaacggccattcctctcctcgccggattgctgatggcgagatacttgttcaaattccaccctgccctgtcattgggatgtacggcaggagcacgtactacaacagctgcattgggagctattcaggatgcagtggaaagcgacacaccggcattaggatatacggtgacgtatgcagtcggcaatacgctcctgattatctggggagttgtcatcgtactacttatgtaaaactatataaataaatatcattatggaaaagaaaacaaataaccctgccattaccaaaagttatgccaagaaaatggaaacgatcagcccgttcgagctgaaaaacaaactgatcaatatggcagatgaaagtatcaagaagatagcacatacgatgttgaatgccggaagaggtaacccgaactggattgctaccgaaccacgcgaagccttttttctgctgggacaattcggcctttgcgaatgtcgtcatgcgttttcactggaagaaggaatagcaggtattccgcaaaaggcgggaattgctgcccgtttcgaggctttcctgaaagaaaacgagaaagctcccggtgctaacctattgaaagagggctataattatatgctgatggaacatgctgccgatccggatacgcttattcacgaatgggcagaatcggtgattggcgaccagtatcctgtgcccgaccgtattttacattttacggagttaatcgtacaggattacctggcgcaagagatgtgtgaccgccgtccgccgaaaggaacttttgaccttttcgcgactgaaggaggtacagcagccatgtgttatctgttcgattctttgcaagagaatttcctgttgaaccagggggatgctattgctttgatggttcctgtgttcactccttatatagaaatcccggaactgcgacgctatcagttcgacgttaccgaaatttctgccgaccagatgactcctgacggtttacatacctggcagtataaggatgaagatatagacaagctgaaagatccgcggatcaaagcgttgtttatcaccaatccgagcaacccgcccagctatgcacttagcaaagagactaccgaacgtatcatcaacattgtgaagaatgataatccgaacctgatgattatcacggatgatgtgtacggaacgtttattcctcatttccgttcattgatggcagagttgccgcacaatacgctttgcgtttattcgttctccaaatatttcggagctacaggatggagaaccgctgttatcgctctacacgaagacaacatctacgacaaaatgattgcccgcctgtcggaggagcagaaatcaatcttgaacaaacgttattccagccttagcctgcaaccggaaaagatgaaatttattgagcgcatggtggctgacagccgacaaattgcgctgaatcatactgcagggctttccctgccccaacagatacagatgagtttgtttgccatcttctcgctcctggataaagaagacagttataagaagaagatgcaggaaattattcatcgtcgtctgcatgcgttgtgggataacacaggtttcacgctggtggaagatccgttacgtgccggatattattcggagatcgatatgctggtatgggcgaagaaattctatggggatgacttcgttacttatctgcaaaagacctacaatccattggatgtggttttccgcctggcaaacgaaacttcactcgttctgttgaatggtggtggctttgccggaccgaaatggagtgtgcgtgtgtcactagccaatttgaatgaggccgattatgtgaaaatcggacaaagcatcaagtgtgtgttggaagaatatgcccaaacatggaaagcatcaaaagaatgaactaagtagttcattttataaatgagaatttaattcagacagaagaacataagaacaaaaaataaaattgcagttaaataaacaacagaaataattttcaaagcgcagcatttatgttcttttgttcttatgtctgaaatttttctcgctcttatgtctaaaaattaattagcgtttatttaaagcgggaggtatcgacctcttccctttttttctctttgtatcctccgaatttataattaaacgaaataccgaatgtacgggtagtgcgcatatagtggtttttcacattctgcaatccgtaacggacttgtgtcgaaatggtggaggtattgaacaggtcgtcacacttcagcgtcaattgtgcttttccttttgcaaaggtgtaacgaagcgctgcatccagatttctcaaacgaggaagatcgaaaattccctgtatagctctattttgatagaatccggtcagggtgaattttaaatcgggtttggtggaaagggtgaatgtgttgttcatcgtcaagacgaatgtatatagtttacggtcaaacgggatatcccagaagtcactatctttctggcgataacgaaaaccgatggcggtgaaacgggagtcgagccattttttcaccttaaagggaactgtcattaccaatccggcttgtgatgaaaaatcaaagttgaagaatttgtaaatctctactaagcgttccggtgactggtagagggtttgcatttgcttgtttttggtatagctataaaaggcggaaaaaacatacttgccttttagtatataattaaggctggtttcatagttcgtggcaggtttgagatagggatttccttgaatttcagagtatgctcccatgtaagagattgcattctgtacgctccagtattcgggatattccttgtcactactcaatgagaattgcaggacatgtccggcagcgggcatataagttagattagctaccgggtacaggctccattcattccagatatttgtatgatattgctctgctgccagagaaacatcggccgagagtttttcaccgaagcttttgcttagtccggcatacacattcagggtttgttcgcgacggcgggagttcatgttattatccggtaacaggttatctgtttccgggtcataatatctttgatagctatggtctaaagcggtcgtataggttataccataattcaatccccagcctttacctaaggtatgttcttgcccggcataaaaacgccattgattgatttgctgtttatcccggctcaagaaattcattgtctctgttcccatcgtgctatataataattggctgccgggagaatgataggatgtaaatgccactccggctttcagcccgaaaggggtttgataatctaactttgcattatggagctggctgtctccctgcgagtcggtaacagaattttgcgcaccggtagctatggaataatgtttggaatcggtaaaagctgttgtgtagaccaggcttaacagatgatcttttgcgagggagtaatccattccgaggcgtatctgatgactgttggtacgggaagtcattatttcatccatatccatctgatgtaccgaaccatcggctaacgtgtgaagtgcttctttctccgttatccttcggtcgcgatcataagagtaagagtaaagaagatctgcagagaatttacgtccggagtacagaagacttccacgttctgccaaagattcgtagtgatgttggttaaaagctgtatagagttctccttgaagggaagatgcttgtcctgtgccgggtgctaatatcaggttaatcatcggtccgcgtacctgatagcgtgccggagcggaatacatcacttccgccttttcaatccggctgacaggaatcgattttaataaagcatccaattgttcggcagacagagtggtcacttttccgttgatgacaacagttacctcctgtcctcccaacatcagactattattcatatttactatacccggaagatttttcacaacatcataggcattatccacaggcaggttgcccaccagtctcggcacgtcatacacgagtttgccttgttcggctttcacgatagggcgttcacctataatcatcacttcgggcagttcctgaaacaaactatccatataacctatattcttgatactgtcgacaggttcctgtgactgttgtccgacttgtgctgtagcggatatccacacacatagaagagacataaatagtaaattaatccgtttcatttcgtctttatttttggaatacgacaaaatacggtagaaaaaatggaaatttgcgttatcactggcttatctagtgttatttagtcttatcaaagagaagaataagaatagtttcctattatctttgtcagtatgaaattaccactaaaacatattgtcatactggttatctgctcattaatcggaatctttgtttatcaagcttattggttgacagggctttaccggtctatgaagatggaaatggagagcaatatcagagatgcgatgcggacgagtgactttaacgaggtcgtgctccgggtaaatgatttgcaaaaagataatgtggaacacggttcgctgacggtatcagccggatatgatgcggacggcaattcattagtgactaaacaaacgatttcttatacggatagtagccgtcaggatacgatacattcccggacagaaactaccacagacacggtaaaaaccgttggcaatgcttctgaagattccaaagctgttgcaagtagcgaaagcggactggatgtattattgaaaaagcaagattcgctaaaggagttgttaatgagtattcagcagggcattcattcaggtgtggacacttatatagatgtcaacctgcagcgatatgacagtttgctcacccatgtgatgaaagagcataatctttctattcctcatcacactcttttgatttatacaggaaccagtgccgattcttccattgtatatacagatacattaggtattgcgggagatagcagttatattcccagtcccaaggcaattcgctatgactatgaatttaatatgcatcacagccaacgctaccaactggtgttcgagccgatcaattcattggtattaaagcagatgacaggtattctggtcacttcatttgtaattcttctgattctcggattctctttctggttccttatccggacgctcctgaaacagaaaacactggatgaaatgaaaagtgattttaccaataatatcacgcacgaattaaagactcccattgccgtagcctatgcggctaatgacgcattactgaactttaaccaagcggaagagaaaagcaagcgcgaccagtatctacgcatcagtcaggagcagttgcaaaggcttagcgggctggtggaacagattttatccataggaatggagcgtcgcaaaacgttccgtttacatccggaggaaatcaacctgaaggagctgattactccgctcatggagcagcaccagctaaaagcggacaagcctgtacatatcgaattggacattaaaccggaaacgcttgttattgttgcagaccgtacgcatttcagcaacatcatcagtaacttgatagataatgctgtgaagtactcgaaagaggaagccgaattgtctatttcctgccgacagacagggggaacagtaaccatcagcgttaccgaccggggaatcggaattccacttgataaacaaaagcatatatttgataaattctaccgggtcccgacgggcaatcttcataatataaaaggttacggactaggactgttctatgtcaagagcatggtcgaaaaacatggagggactatcaccgtaaagagtgaaccggacaaaggaagcacttttaccattactttataaacccataaaatcatgagtaaaaacaaaattaccgtattactggtagaagacgaacagacgctcgccatgatcatcaaagatacacttgaagaaaatgattttatcattcatacggcgaatgacggcgaggaaggtctaagccttttcttcgaacttcatccggatatacttgtagctgatgtgatgatgccgaaaatagatggctttgaaatggtacgtcgcatccgccagacggataaacagactcctatcttattcctgactgcccgttcgaccatcaatgatgtggtggagggctttgaactcggagcgaatgattacctgaaaaaacctttcggtatacaagagctgattatccgaatcaaagcactgatgggaaaggcttttctcttcacagagaataaggttgccaatcattttgagataggaagttatctgtttgatcctgttgcacaaactttattacacgcaggaacgagacaggaactctctcatcgtgaatcggaaatcttgaaacggctttgcgagaaccggaatcaggtggtcaacacgcaggatgtcttgctcgaactttggggagatgacagttttttcaattcccgaagcttgcatgtgttcatcaccaaattgcggcataaactctcgcaagatgaacagatacgtattgtcaatgtacggggaatcggttataaactgattgtcaactaaactctttaacaccgcaaagtgccatgaataaaagacagttcacaggatttatgtttttactttgtacctgtaccgcatttgcgcaacaggtggaagtgaaaaaggatagcatcggccgtgcggttcttctgccaccggagcaaaagcagccattaaatatggataaggagggcttcatcttacccgatatgaatataacaccgaacgacaggaagccaaccattcaaacggatagcatgacgcttcatatatctcctcccgaatttatggatactccctggcctactcccagactgggtacttctttcgatcctttcagccgcgactataatcggtcggatattttcgggatcaatgctaacagctatttaagtacgtatagtttgcataatacgtatcctaccatggggacgcatattcaggtaggtgccatttatacgtatgcccctaatgaacgatgggagctttcaggtgggctgttcagtgccaagtacacaatgccttctttccaacatggtgccagaaatgattttggttttagcggttcggccgcttaccggattaataaatttctgcgtatacgggctttcggcgaatattctgtgaatggcgaacgaaatgcttcgcaggggtatctcactcctatctatccgcaaagcggttatggcatgatgcttgaaatcaagttcaacgattatatcgaactccatggaggtatggaacgctcatacaacccgatgaaaaggaaatgggagacggctcctgtcgtttatccggtgattaaattgaaaagataagtttttttctaagaaaacataacggaagcggatagtcaggtggaaattatctatctttgtggtaaatcaacctttacgaagatgaaaaaacagattctatttctttcgctgatattatcggtcggttttgcatccgcacagtcagaaattccttccgatagtattcgtcgtgctccatctaccaatatcaaagagtttggtggttttctactggatatggggttaatgaacgtagcaactcccgaacttcccaagtttaatttagatatgcctaatatgacgaaagattataatcagctctttcgtttaaacacggatattacctattctcaaggattcactgactctttttcttcgtcttcttactccgggttttccggttttggatacggatatggttggggattgtcttcttctccacagtttatgcagatgggatctttcaaactgaaaaacggaatgagaatcaatacttacggagattacaacaaggatggctggcgggtgcctaaccgcagtgctatgccttgggaaagaaataatttccggggagcgtttgaactgaaatctgctaatggtaatttcggaatacgaattgaggtgcagcaaggaagaaatgttccttattaaataataattaggcacggattacacgtatgtcacggtctttagggttatcattgctgaaaaacaaccgcgttaatccgtgtaatccgtgcctaaaaaatagcaattaattagtggcaggtagttataaaatcaggaaaatcagaaggctttgtctgccgcactgattgcattggctatacggtcacaccacgaatcaaattccggatcgggtgtttgagtttccggatgagaaagcatataatgtacagcttgccgcaatccgtccgccatagagatatggcatataaaatccgggacgagccgctttatcttcgaattatcgaaaacaaccgtagctgctttatctcctaagagttctcccctgaaatcataatgatcgctatgtttggcaaggaaatcggatgctacgtgcaatgcgttcagaggtttgcctaacgcatcggcgattgtctggtaaatctgattccaagtcatactttcatcggtagtgatatgaaaagcgttcccaatggcatgtggattcgccatcagtccgacatagcctttggcaaaatctttggagtgagtcagtgtccacaaagaggagccatcgccgggaataatgacaggtttgccgtcaagaatccgtttgagaatctgccagtttcccttatctccatgtacggctacgggaggtttggttccgttataggtatggctgggacgaacgatggtcaccggaaaaccacttgtccggtaggctgacatcaatacctcttccgcttctatcttgtttctggaatactgccagtagggattgaccagaggggtgctttcggtaatgcgataatcggtcaatggcttttgataggcagaggcactgctgataaagatgtattgccgcgttttattctgaaacaggcggatatcacgctttacgtcttctgccgtataaccgatgaattgtgcaatcacatcgtaatgttcaagtgcgatggcttttgccacagcttcttcatcattaatatccgcaatgatactgtgaattccttccggcattttttttgagccgcggttaaggagcgtaatctcccaccctctctgttgcgccaatgcaactacatctgtactgatagtacccgttcctccaatgaataatgctttcataaaacctgttttttatattctccggagcaaatatatcaattccatgacttacttccagcaatcattgccatttatttttccgcccgcaagtttatgtagtatacagattactgattcttgtacccttattactgatttgaggtatgaaataaaaaagatacctccaaatgttttatctttgtatcagattaataacaaagcatatggatgaaataacaaaaattgaaaccgtcgatcagtatgaccagttgtttggactggagacattgcaccctttagttaatgtaatcgacttctcaaaagctaccaagtcggttgagtatatccgtatgaacatcggattctattgtctgttcctgaaagatgccaaatgcggggatctcacatacggacgtaagaattacgattatcaggaaggaacggttgtctgtatggcaccgggacaagtgagcggaatagacaaccgtaaccgaacggctccccgtaccaagtcgattggcgttttattccaccccgatttaatccgtggaacttcattaggacagaatatcaaaaactatacttttttctcttacgaggtaaatgaggcattgcatctttcagatcaggaaagagaaatcgtaaccgattgcatacataaaatccggctcgaactggagcatactatcgacaagcatagcaagcaacttatcgtacggaatatcgaactgctactggattactgtatgcgtttctacgaacggcagttcattacacgcaatcaggcgaataaagatatagtcgttaaattcgagcaattactggacgaatatttccaaaatcaggtggcaatgaccgaaggactgccatccgtgaaatactttgcagacaaggcatgcctctctcctaattatttcggggacctgataaagaaagaaaccggaaaaactgcacaggaatatatccagtgccgaattatcgaactggccaaagaaagaatactggaaggtgttcaaactgtcagccaggtagcttatgaactgggatttcaatatccacagcacttcagccggttatttaaaaagcatgtcggctgcaccccgaacgaatataaacaaaaaaactagacgtattttagatacaggagtctcaacatcatgggagataaagtactcaaaataggaaccgtgcatcaatgcaattgttgcctggggagtaagacactacacccgctggtaagtgtcatcgatctctcaaaggctgacttgtcagctcatacgggcatcaagttcgacttttatacgattctattgagtgagtgtaaatgtgaagcgtatatgtatggtcaccagtattatgatttttcggatggtactttgctcttccttagtcccggagagtctatcaatatgaaggaaaacagtaagaattttccttccaaaggatggatattggcttttcatcccgatctgatttgtggcactccgctcggacttaatatacataactatactttcttctcttatctgcctgaagaagcattacatatatctttgcgcgagaagcaaatcattctggagtttatggataaaataaaccaggaactcgaacgttgcattgaccgacatagcaagaagatagtttccaagtatatagaactattgctggattactgtatccgtttctacgaacgccaattcattacacgtaatgaagcgaataaaacgattatcaaacaattcgataaaatcataaataaccattttgaaacgaaacaggtaccgactgtcgatatactttcacataagtattgtgcgaacctgcttcatttgtctcctgaatatttcaacgacttactgaagtatgaaacggggaaatcatttaaagagtatatcgagttcaaacgcttcgagattgccaaagattggttggtgaatactgataaaacaatcaatcagataacgcaagagctgggttttcagaatccacagtatttcagccggttatttaagaaaatcacaggttgttctccgaatgatttcaggatacctaattgaaagtatatgtcaaagggattagaggaagataaagcaatcaaaaagtcttaataaaatttgaattggaatatcaaattcttaatctatgttatgaaacatactttttttcttggaatatttgctaatttcgcaatagtccgtatctttacaatgtgtttttcatagtattagatttaaggttaacaaaggttggagcaaggcgttgctcctttttttatgtctatacgtaagctctctcctttttcttattcatgataatataggaattacgctatttttcaataactttgcaaaaagagagatgtcaataatgtctcgataagacagatcaaaaggttctctttttacgttacatataaaaagattatttaatccttgtagaataatggaaacaatgcaaccatattatcgtctgatgaaatcaatcctctttgtattatttctttcttttggcatgatttcatgtgagaaagaggatcctgtttctacctctccaactacaaggcaaacggatgactcaactactgatccgacagatcccgatccgactgatcctgttgttcgttcgaataatgaacagacggtgttcatgtatctaccctggtcgaacaatctcacttcttttttctatcagaacattgccgatttgaaaagtatcatcggaaacaatatattgaagaatgaacgggtgatcgtatttatatgtacatcggccaccaaagccactctctccgaacttgtctatgagaatggcaaaggtgtacagaagactttaaaaaactacgattatccggatcctacctatacaactgcagagggcatcacttctattttgaacgatgtacaaacctatgctcccgccaaacgatatgcaatgattatcggatgccacggaatgggatggatacctgtatcgagagcagtttcacgcagcagcttgcagattagtaaaaagcactgggagtatgaacatgcaccgatgacacgtttttttggaggaacacaaacgaaatatcaaactgatattactacgcttgccggaggtatttcgaacgcgggcctaaagatggaatatatacttttcgatgactgctatatgtctacggtagaggttgcctatgaccttaaaaacgtaacaagccacttgatagcttctacaagtgaaataatggcctatgggatgccatacgacaagataggccagtacttaatcggaaatatagattacgaaaaggtctgtgacggtttctattctttttattcaaattatgtgactccctgcggaacaatcggtgttactgattgctcggaattggacaacctggcggctattatgaaagaaataaatcagcgttatacgtttaacgaagaattaacgggcgaattacaaagattagacggatatacgcctaccatattctttgattacggtgattacgtttccaaactatgttccgatccggatctattagaacaattcaacgagcagctgaaacgcgctgtaccctttaaaaggaataccgaacagtattttacagcaatctcttcctcctactatggagaaaaaattgatatcaatactttctccggaatcacgatttccgacccaagcactaatccgggtgcttcaaaaaagaacgaaacagcgtggtatattgccactcattaaatctactctaagaagcatacggtggtagagagttgattcttcacatgtggtctgtcaaatctcttaataaaaattgaattgagaaaaccaattcttaatcaatgttataaaacatactttttttcttggattatttgctaatttcgcaatagtctgtatctttgcattgtgtttttcatagtattagatttaaggttaacaaaggttggagcaaggcgttgctcctttttttatgtccatacgctagatactcctttaaacatggcatgacattatcccttaatcaccgccattggagccagctccatcaacggtttcaccaagtcccgctcattcgctatcacttgcgcaatatctttataagctcccggtgcttcatccagttcgttctgcgaacgaagtccgtgaatgataccttgctgatccattctctccttctcttcatccagtgacaaacggcgacaggcatcctttcttcccattaatcgacctgcaccatgcgaacagcttttgaaactctccggattacccagtccctcaacaatataagacttggtacccatagatccggggataataccgatctcgccctcataggcacgcgtagcaccttttcggtgtacaatcacatcctgatcgaagtgattctcccaagctgcatagttgtgggcaatattaatcataggatcaaagtccgtttcaggtttcactgcctggatggcttcacaaatacgagtcatcatcaactgacggttggcaaaggcaaaggccacacaataattcatttcacggaaataatcctttgccatctgtgtctccattggcaggtaagctagtcccgataccatttcagaataccatttctcattccaatattgcgcaatcttattatagtgattggcaaccttcaaaccaatgttacggcttccggagtgaatcatcacccaaacatcagacgttgcggtatctttttgaatctcaataaagtgatttccacctcccagagttcctatctgcttcaaacaagcctcgtactgattcttcaaaacaggcatctcttcaaagtcgaatccttgcggaagcaattcctgatcctgctttttattctgatgatcgaatcccaaaggaacaaccgcacgaatcttcgacataatggaagtcaaatccgtataactaaaatcttccgcttttagatttgtcttaatcgcacacataccacaaccgatatccactcccacagcattgggaacaatcacgctattggtagccaacacaccgccaataggcattccttttcccgcatgcgcatcaggcatgatgacaatatgtttaaatgcaaaaggcagtgaagtcaaatccatgatctgcgacatacaagagtcctctacttcatccaaccaaagtttagcgggtaaacgtgttcccataattactttttccatacatcttttcttttatcaattcatataaatctcgttatcgggagcaaagtaagaagggaagtacgaaatctatttgcgtagttgatattattttttatttttgtagaaataatctataacatctatatatagaacctaatgaagaagatattaattatcggcgccaacggattcaccggacgccagattttaaatgatttatctgcttgtaaacaatacaagctgacgggctgctccctgcatccggatattcttcccaataacgcggaggattatcgtttcatcgaaacagatatacggaatgaagcggacgttagtcatctcttcaaagaggttcaacccgatgtagtcattaattgctccgctctgtccgtgccggactattgcgaaacgcatcatgaagaagcctatcttaccaatgttaccgcagtaggccaactggccgatttatgcgaagaatacaaaagccggttcattcatttatctacggactttgtttttgatggaaagataaacgaaactgccgggctgttatatacagaaaaagacctccctgccccggtcaactactacggatataccaaatggaaaggagaagagagagtggcagaaacttgcagcagttatgccattgtccgtgtagaaatcgtttatggcaaggcactgccgggacaacacggtaatattgtacagctagtaatgaaccgtctgaaagccggacaagaaatacgtgtcgtatccgatcaatggcggacaccaacctatgttggagacgtttcggatggagtgctacgtttaatagaacatacggcgaatggcatcttccacatctgtggcgatgaatgtatgaccattgcagagattgcctaccaggtagcagattatatgaaactcgaccgttctcttatccatcctaccaccacagaagaaatgaatgaaagcactccccgtccccgcttcagtgggatgagtattgataaagcccggacaatgctcggatacaggccccaaaagttaaaagaaattcttgcgaactgggataaattataagggaaagagcacataaccaactttttacaaccatctatctcgttccggatattcctttctctttatttattgcatatttattttgaaaatatgcaataaataactatctttgcaccaaattcaaaaaagaccaatgatgaatcaaacattacaattacataacgctactctttttcttgcaggaatacctattttctgtaagtcttgttgcgtgcatgtgcattggttcagtggattcatctaaatttcccaactatttctttacaggaactacctgctgacttgttttgttagccatagcagtattcctttctgattttcaagcagatgtaatatcttctttgaaaattcttttgtgtgttgtcaatcatcagtttaacctaacccaaaatatatacaattatgttctctattatatctaccatgtttttaggaatcggcatcggctatgtattgcgtaactggagtattctacagaagacagaaaagacaatttctcttacaatattcctgttgctctttattctcggtgtatctatcggttctaatagcctgattgtgaacaatcttggtaagttcggatggcaagccattgttcttgctgtgtccggtgtattgggaagcctgattgctgcccgtttggtactacaattatttttcaggaaaggaggcgaacaatgaaaggaagtctgatcgttatagtattcttttgtgtaggctgtatcatgggagctttcaataagttcgagttcgatacgcacacagtttccatgtacatactttatgcattaatgttacaagtaggaatcagcatcggttccaataagaacctgaaagccattgtttcacatttgcaccctaaaatgttgctgattccattgggaacaattatcggtacgctgttattctccgccctggcaagtttgctattgcgtcaatggagcgtgttcgactgtatggcagtgggaagtggatttgcctactattcactctcttccatccttatcacccagttcaaagaaccctccatcggactgcaactggctacggaactgggaaccattgccctactgactaatattttccgtgagatgatgacacttcttggtactccaatcatcaagaagtacttcgggaaactcgctcctatttcagcagcaggagtcaactcgatggatgtactgctgccttccatcaccagatattcaggaaaagaaatgattcccatcgccatcctgcacggcattctgattgacatcagcgttcccgttttcgtttctttcttctgtaatctttaaccctgtccgggaataataaccttatttattaatgcccggaaacagccaatacaaacttgatatcagcataggagacagcgtctcctaatgctacctttatagcgaatattcccatgtattcatgttcatccaaatacttgcgaatcttcgctatattttcagctttcaccacctgctccactttgatctttcccgaacggacataatgctccagatgtccggcaatggttccggataccaaatcacgagccttggctatttcatctatattcattccctgacggaacatttcatagctaaccaacttcgtatctttcttcgcctccttctttttctccttctccgcctctttctcctgtttctctgcctctttctgcagcttcgtctttcgttgccttactgtatcatcgctattaccggaggagattaacatatccgttatctccggcctctccaattgattctccgccatatacttgcggataatacccagaatctcaagcccgtatctctctactcctttcgctccaaaataaggtatcgcctccaaagctcttggactatccggtagcagattcacaattcccatcaatgctttctgttgcataatcacataagcaggaacattcatctcccttgttttggctgttctccattcagacagggcacgataaagctccggatgcagaatatccgtaggaacttccacctttaccttttcagcactgcgtgtacgctctttccgttccttacgttctttcttctccttcaaagccttcgaagaaccggaggacgtagaatcatcttcaaggctcaacattactttagccttcaacttcaaataatccgtgatagcaaacttccctcttgtagacacagcttccaacaaagactctttaatccacaacgcatcatccagcgcctgcatacgctctgccaacagctttctcaactctttattatcaagaggcatattagtcttatcatacaaagcccgaaccggttccaactccttatgaaaatatccggcaccggaacgaatccgttcctgcaactcctcattcgccgcataatcctcactctcatgtatcaaccgggtatactgattgcggaaacgttgagacacctccacaatcttctctttaacatggggagccaacgccttatattcagccaactgcttcggaaagagcttatacaaatcctcatccataagacgaagcaaccgtttataagcctgatcgatcgaatagaaattaaacaaatcactcaacaaatcaaagaaatacgccttttgcatatcattcaactgctggctgcccggcttattctgctccaccgctttggtgaaattatccaccgtagcatcacttattatggcttccctgcgcaaaggagactccaacaccataccctccagcgtcttgcaacgactcaaagccacgtaagtttgtccatgtgcaaaggaattccgtgcatcaataatagcacgttcaaacgtcaaaccctgactcttatgtatcgtaatagcccacgccaaacgaataggatactggcggaacgtcccctctatcacttcagtgatctccttcgtctcctcattcaacacatacttataattcccccactcttccggcaacaactgaaattcggatctatcccctttaccacgcaccacaatacccgtttcattaaccgctaccacctcaccaatcataccgttataataccgtttctcggacgatggatcattcttcaggaacattatctgtgctccctccttaattgtcagaagtttatccgcaggatacgaatattcaggaaaatccccctctatctcggcactaaaatgatacgccttgccgggcaacgatgccagttcgcaatcattaaccctctgtgcctgattattatgtgtcgtcagacgaatatatccctcttctttctgcggctgaaagccgggctgataacgacggttcagttcattcaacacttcatcatccgccttattctcccgaattttatttaataaagaaaggaagaacgtatcactctgacgatatactttcttgagttcaatcgtcatatatgccgtttctttcaatgcatgacttgcaaagaaataaggagtctcataatgctttctcaacaactcccactcattgtctttcacgacaggcgccagctgttgcaaatctccaatcatcaacagttgcaccccaccaaaaggtttctccctatcgcgatacctccgcagagttgcatccaccgcatccaacaaatcagcacgcaccatactgatctcatcaataaccagcaaatccatactacggatgatattccgcttttctttactataacgataatgtgtctgggaagaattaaaggttgtttcgggcacaaaaggagcaaaagacaactgaaagaaagaatgaatcgttacgcctcccgcattgatagctgcaatccctgtcggagccaatatgaccatgcgtttgggcgtatgttctttcaatcgtctaagaaatgtcgttttcccggttccagcttttccggtaagaaataaatgggtgcctgtattttcaatgaactgccaagcaagctgcagttccggattattttccatgcttttccaattttcggtaaagttactgaatattctttttctttcgtcttgatacgaaagaaaaagaaccaaaaagaaagaatcaaggctgcgtttttccggctactccggtgcttcctccggctaaagggcagaaactcgctacgctcaaacagtctgccctttttaacgccggagaaaccacctgcgcttgacgccggaaaaacgaggccggaagacctgcgggtggaagccttacaatgtgggaagctttattattaaaaaactcaccatataaaaagaggacatagaataaaaggctaatagaatgataaccgatgtagcctatgtagtataaagagacttatgaaaggtttataccccttataaaaaagctttgctatataaaagtcgcagacgttatacgactcaatatagcaaagcagaacaatatataataaaactattaacgatataactgcgactcaccaaagcaatatcagacatatcgcacagcttccccacaaacctaccctagaacattcaagcagcaacacccaccccaccaggttccccggcctacttttttctccatcaggcgagcgcccgtaacggagcgttaagaagggcagactgtttgagcgtagcgagtttctgccctttagcgaagtgaaggaagagagtaggagaaaaaagtcagccttgaatttttctttgcttctttcttttgtttcaagacaaaagaaagaagattaattacttcatggatccccctacaatatccagcaattcgtttgtaatcgcctgctgacgactcttattgtactgcttcgtcaaatcctggatcagctcgtttgcgttgtccgtagccacttgcatagccaacgtacgtgcagcatgttccgaagcattggagtcaacagcggcagtaaaaatcttctggctcaatacagtggggattaagctcgcgattaattcctctgcgttcggttcgatgatataatcattggcaatctcgttctcctgtacctcctcttcattctctctgtcctcttcacttacgacgttcgtcagattaatggggagatacgtctcacgaagaagaatctgtacccccattgatttgaagtgatgatagattatttccacccggtccacttcgcctgctacatacagatccatcagtcggtgagccagttcggcagcctcctgatacgttggtttgtcggagagtgttggagaaacctcctgcggtttgaaacccatccgtttggccgcttcatccaccttcttgcctaccgggaatatcaagatattatcctgtcctaaagtacggaattccccgatagtctgcatcatcattttgatgacattggcgttgaaagcaccacaaagagaagtgttcgaagaaaaaacaacgattgctacacgcttcacttcacgctcctgcacataaggagattcgataggcaggtccgcacttaggaagttagtcagaatcttgttcaacttcttctgataaggcagcatattctcaatggctccttgtgccttgtgtaatttggcagaagccaccatcttcattgctgaagtgatttttcgggtactcttgaccgaatttattctggtttttacttctttcagtgaagccatagtgataattaaaaattaaaaattaataattaaaaataaaagggcgatctgatttataaaaaagccaattagataaatcaaaaaccattcagatttattttaaaggccaatcagataaatcaatgaccgattagataaattgtttagtgaccatggcggcagtctcttcgatagccttaatcacattatcatcaatcacacccgttttcaatacatccaatacatcctcctgatgattcagttgcagcgattcgatgaagctacgttcaaagtcctgcaccttatccagaggaacatcgtggagcagtccgtgtgtaccacagtagagaatagcaatctgctgttctacgggcatcgggctgtattgaggctgaatcaacagctgaccgttcttacgtcccttgtcaatcgtcaatgcggtaatcgggtccatgtcgctactgaacttggagaacgcttccagttcacgatactgtgcctggtcgatcttcaatgttcccgccactttcttcatagccttaatctgcgcgttaccacctacacgggatacagagataccgacgttgatagccggacgcgtaccctggttgaacaagtcagtttcaaggaatatctgtccgtcggtgatagaaatcacgttcgtcgggatataagccgatacgtcaccagcctgcgtttcgatgataggcaatgccgtgagcgaaccaccgcctttgacaattcccttcagactttccggaagatcgttcatttcgcgagccacttcctcctgactgataatcttggcagcacgttccaacagacgggagtgcagatagaagatatcacccggataagcctcacgacctgatggacggcgaagaatcagagaaacctcacgataagctaccgcctgcttggaaaggtcatcataaaccaccaacgcatgacgaccggtatcacggaaatactcgccaatggcagcacccgcaaaaggagcgtaatactgcaatgcagccggatcaccagccgtagcagccaccacaatcgtgtagtccagtgctccgtactcacgaagcgtattaacgatagaagcaacggtagaacccttctgaccgatagccacataaatacaatatacaggatcacctgccaggaagttactgcgctggttgataatcgtatcaatagcgatggcagtctttcccgtctggcggtcgccgataatcaactcacgctgtccgcgaccgataggaatcatggcgtctaccgccttcaatcccgtctgcaacggttggttcacaggctgacggtagattacccccggagctttccgttccaatggcatatcatacagttcgccaccaaccagccccttgccgtcgagcggttcgcccagcgggtcgatcacacgtcccagcatgccctctcctacacggatggaggcgatacgtttggtacgcttcacgacgaatccctctttgatcttgtccgtcggacccaacagcacagcacccacgttgtcctcttcgaggttcatcacgattgctttgataccattgtcaaactccagcaattcattggcttcggcatttcgcaatccataaatacgcactacgccgtcgctcacctggagcaccgtaccgatttcgtcaagttgcacattggcgttgattccttcgagctgcttgcgcaatatatcagatacttcgcttacttttatattttcagacattatacaattctcctattcttatcaataaattgttgtttcactcgcttcaactgcgtggcaacgcttgcatccagtcggtagtcgttgacatcgaagataaatccgccttcgatcgaaggatctatcaccgtttcgagttccatctgggcgtgcaagatatgctctgctgcggaacgaatccggttttccgtttccttattgacgggaacggctgtaatgagcttacccactccgatatgcttcagcttccggtagagatccagatacatcaggctgataaattgcagatagccttcacgcctgtttcgcagtaccaaagtgataaaacggacaaactctctggtcgattttccgtcaccgtcggcagccgtgcagactaacgccaacttttccttcgttgtgatgaccggattatcaagtgcttcgcgcaaaccgggttgttcacaaaaactgtgcgacagcgtcaggaactcctgatataacctgtcctccagacctttttcctgtgcatattcaatgatggcttttgcataacgcattgagagtattccgacttccatcttccttagttcttattcggggttagtacttcatccagcatacggtcgatcatgcccatctgtgcttccttgtcctcaagactcttgcggagcactttctcggcgatgtccacagaaagcacggctacctggcgacggatgtcgcggatggcttcgtctttctctatctggatttgttgtttcaccgcatccagttctttttgtgcggcaatttcggcttgtttacgggcctcgtgaacaatcttgtcacgttcttccattgcttccctcaagatgcgtccttgttctttgttggcggcagccaccaatgcgtcgccttcctctttcagtttagacaactgggcattagcctctctcgccacctccaaagactggtcgatataggtcttacgaccctccaccatcttgatgatgacgggaaagccgtatttcgccaatatcacgaacacaatcccgaatgagagaaacatccagaacagcaggccactatcaggtaatagtaatgacataatctttatttacgattttacgatttacaatttacgatttcgcggctgatcatgatttgaaacatggttcacgcctgcgaaattcgcttgttatatacctgattagaggaagaacaccaacagacaaactactaccgccaacagagccacaccttcaatcaaggcggcggcgataatcatgttcatacggatgtcccctgatgcttccggctggcgtgcgatagcttccattgccgaaccaccaatcttaccaatacccaaaccagctccgattactgcaagacctgcaccgatagctgcacctaatttactaactcctactgctgctgcagtggcttgtaacaatactgatagtaacataattttcagttttaaaatggtttatattttctcttgtttattatttaatcattcattccgcgcgtttattccgtattctttttatcaacgttttcaccgcgtttcatttcaattttcttcagctttcactttggcaccttcctgtgccagaccgataaacactgccgacaacatcgtaaatacgtaagcctggatgaaagcaaccaacaactcaagcgcattcataaagatgttgaacaatacagaagccaccgtcagcgtgccgttcagtgcaggccccatgcttgccgagataaagatcaggcaggtaagcaccagcatcgccatgtgtcccgccagcatattggcaaaaagacggatcatcaaagcaaacggtttcgtgaagattccgaagaactcgatgaatggcatcatcggtatgggcactttcagccaccagggtacatcaggccagaaaatatccttccagtaatgtttagaaccgaagatattcactgccaggaacgtgcagactgcaagcaccatagtgatagcgatatttcccgtcacgttcgcacctccggggaagaacggaatcaatcccatcatgttattgataaagatgaaaaagaacgctgtcagcagatacggtgcaaacttccggtagttgggtcctacacaactcttgataatgtcatcgttcaccatcatgatgaacatctccatgaatccgataaatcctcccggcgctttcgctccttgcggacgttttctgtaccagtgtgacacgctcaatacgatgatgagcaacaacacgctgttgaacagcaaagcaaatgtcactttcgtgatggaaatatcccacgggcggacctgttcgcctgccacattatactctaccagtttgccctcgtacttacttccttcgggagcgatggaaagtccttcataagtccctccattctcttcgagacgggaagaaaggaacgtgtgccaacctgtagtgctactataaacaataataggtaatggtatagtaatgtgcgtgttaccccacgtcgtaatatgccattcgtaggagtcgccgatatgaccgaacacaatttctttcacatccaccgtgttctcctgttcctctttcggagtaatctcgtcctgcgtctgttgtgacaccgcttccccctcctgttcctgtgcaagaaccggcaagctgactgccgccatgaggcagaacagaatcaacggagctactatgttatgcaactgtttcatttttcttcttatttttctttttccgtttctgattcaactcaaaagagaagaagaaccaggtttcgaataccagatatatcaaatagaacaagataaacgtcagcagaaaggctctggcttcttcgcgaacggcaagacaataaatcaataccagaatcagcgaaagaatcatttttatcatcttcgttgccagatacaacagtaacattctctgtggagcatgccgacggcaagcgtcgaaagcataaatgctaaacagcccgaagaagtaaaaatagatcggaataaacggataccctccgaaataatgccccggcaaagcgaagtgtagaatgacagctccgagtgccccgctaattaccgcaaataaggtatgccaccaaataaaattccgtttagttttactaatattcaccatgttactgtgtttttctgtaagattataacctcgtttttttcatttttttaatgcttagtctttgtgccggtgaggagtttccgtcaggaaacacaggcagaaaccgtaccgtcactcatttcgacaaaaccgccctgaatatccatcgtgtgctcttctccgtccatcgtcgtgtaactcaacgttcccgctttcaacgacgaaacaatgggcgcatgcccggggagaatagaaaacgaaccgatcattcccggcaatgtgacaatcttcacatttccgtcgaatatgctcttttcgggcgatactatactcaaatgcagttctttcatcatgctatctttttatttttttgctgcctgttccagcaatttcttacctttctctattgcctcctcaatggttccgacattcaagaaagcctgttcgggaagataatccacttctccttccagaatcatcttgaatcccttgatggtgtcttcaatacccaccatcacacccggaacgcccgtaaactgttcagccacggcaaacggttgtgaaaggaaacgctgcacacggcgggcgcggttcactaccatcttgtcttcttccgagagttcttccataccgaggatggagataatatcttgtaattccttgttacgttgcagaatttgtttcacttgctgcgctacgtcgtagtgttcctggccaacaatgtgcgggtcgaggatacgtgacgtagaagccaacgggtctaccgccggataaatacccagctccgtaatcttacggtcgagcacggtagttgcgtccaagtggctgaaagttgttgcaggagccggatcggtcaagtcatcggcaggcacatacaccgcctgtacggaggtgatagaacctttgcgggtagacgtgatacgttcctgcatcgcacccatttccgtagccaacgtgggctggtaaccaacagcggagggcatacgtcccaaaagggcggacacttccgaacctgcttgcgtgaaacggaagatattatcaataaagaacagaatatcgcgtttctcaccttcttttcctgcgtcgcggaaagattccgccaccgtcagtccggacaatgccacagaggcacgtgcgcccggaggctcgttcatctgaccgaaaatcagagacacttgcgatttctccagttcgttataatccactttcgaaagatcccagtgacctttctccattccttctttgaatgcttcgccgtaacggattacaccggattcaatcatttcgcgcagcaagtcgttaccttcacgggtacgttcacctactccggcaaatacagagaatccattatgtttcttggcgatattattgataagttcctgaatcaatacagtctttcctacaccggcaccgccgaacaaaccgattttaccacctttggcatacggttcgagcaggtcgatcactttgatacctgtgaagagcacctcttgcacagtagtcaaatcctcaaacttaggggggtcgcgatgaatggaatatgcacctttgcggtcgagtcctttcataccgtcgatcgaatcaccgactacgttcatcagtcgtcctttaatctgttcgccaatcggcatcgtgatcgggcctccggtgggatacactttcatgcctctctgaagtccgtcagtactgtccatcgctacggtacgcaccgtattttcgccgatatgttgctgaacttctataaccagtattttgccgtttggcctctttatctccagtgcgtcgtggatgcttggcagcaccaattctgcatccgtaccctcaaagtacacatcgaccacagggccgatcacctgcgagatatgtccgataatctgtgacataagcaatctcttttatttatattattcttttctctcctttttgactttataatatgaaaggaatgcacatttttcgcgttttacctatttcattattataataaacagttgagttcagtttttgttcaactattttctatatctcataaacttctgtccttagaaatagttaaagaaacaactgcgcaaatgtagaaacaattccgtgtcgttgtgcttcctttttcataatttgtcgttcgataacacttattagacctacaatgactacagattgaccaattcaggcaaatttctgctacaaatcaatagcaaaacaagtttgggggcaataatctatcaataaactaaattaacccatcgagtttcctatctctttgttaaaaatcaatggattagcaaaaacaagaaatagtggcaaaaacaactagttttgtgctcgaacacagaaaagtccgtattttcatgttttccttaagaaagtttaaagccatatttcctgtttttctcctatctattctattccttatatattccgcatttttgcattaagattcacatccatctttataaagttcccaatttgcataaaagagcaatataataacgccacatacaattattatctcatttttttgctgtaattttgcaccactaatataaaacactcaaaatgatgaagaaaatactgttactcggttctggcgaactaggaaaagaatttgtaatttcagctcaacgtaaaggccagcacatcattgcttgcgactcctatgcaggagcaccggctatgcaagtggccgatgaatttgaagtattcgacatgctgaacggtgaagagctggaacgcgtggtgaagaaacaccgcccggacatcatcgttccggagattgaagccatccgtacagaacgcttatacgacttcgagaaagaaggtatccaggtagttcccagcgctcgtgccgtgaacttcacgatgaaccgcaaagccattcgcgaccttgccgcccaagaactcggactgaaaacagccaaatacttctatgccacaactctggaagaactgaaagaagctgccgataaaatcggtttcccttgtgtcgttaaaccattgatgtcttcttccggcaaaggacaatcgctcgtgaagagtgccgacgaactcgaacatgcctgggaatacggatgcagcggcagtcgtggcgatattcgcgaacttatcattgaagaatttatcaagttcgacagcgaaatcaccctgctcaccgttacccaaaagaacggccctaccctcttctgccctcctatcggacacgtgcagaaaggtggcgactaccgcgaaagtttccagcctgcacacattgatcccgcccatttgaaagaagcggaagagatggcggagaaagtaacccgtgccctcacaggtgcaggactttggggagttgagttcttcctaagccatgataatggagtctatttctccgaactctctcctcgtccgcatgacacaggtatggtgacactggcgggcacacaaaacctgaatgagtttgaattgcatctgcgtgccgtactcggcctgcccattcccggcatcaaacaagaacggataggcgcaagcgctgtgatcctttccccgattgccagccaggaacgtcctcaatatcgcggactagaagaagtgaccaaagaagaagatacttatctccgcattttcggtaaaccgtttacacgtgtcaaccgccgtatgggtgtggtactttgttatgctccgcttgattctgatttggatgcgttgcgcgacaaggctaagagaattgcagagaaagtagaagttcattaatacaagaaattcagagataagatgaataaaatccgccaagtaaacctgtctgatattccagcactgcaagagctatatcagcatacagttctgactgtgaaccgaaaagattatacagccgaagaagtagcagattgggcttcgtgcggagacgatacgtcacactggaatgagcttttcgaagaacaacattatgtggttgcagaaaacgaagaaggcgtgattgtaggctttggctctgtaaacgatgacggatatatgcacacgctgttcgttcacaaggactttcagcatcaaggtgtcgcaacatctttgtataagcatctcgaagcatatgcacgagaaagaggtgcgaaaagattaacatcagaagttagcatcacggcaaaaccattttttgaaaaacaaggttttcaggtcgatgaagagcaaaagcggaaagctaatcaaatgtgtctcaccaattataagatgagcaagcagctctgttaatcacatctaatcatttctaagatgaaaacatagaagaaagctcatttgcagataaagaaagtcttattttatataagaaaaactccagctatggtgacggataaagttacattagctggagtttttctttttaacttcatgaaatgaaaacgtcatttcttactcaagaaacgtttagccaaatatttacgtattggttcatcatacagcttcaaacacagataagcaagaataatactcaaaataaagacacacaaagctacgtgccaggtttcacctaacgtgtagagttgattctcaatcagccatgcatagaacagatacatcaacggataatgtatcacataaaccggataagatatatctcccaaaaacttacatatctttggtaagcgtctccgcgattctatcttgtcgcccttttttcattcttatatttttgcgatgtataaaaatgaagcattatggatttagcagaaaatcgatttggaaaaacttggaaacatttccttgaagtattgaaagtagactacaattgttctttagccgatgtttgccgcgatcagcataccacttttggtggtatgagttcctggatgtccagacggggctatagcgttaaacaagccaaggcagatgtggtccgtgattattatggcggcgttgaaccctcccaaccgacaacttcctctccttcattcactcaaatagcacccgccatgttgtcggaagaagagtttagtcttgccgggatcacaatcacctttaacagtggaaccaccatttcggtcaaacgggccacacccggtggtgttattaaaatgttgcgcgattacgaaagaaaggagggagatccatgtattctctaacatcagccaatcgctactatctgtaccagggctttgttcgtatgaaccttggcattgacggtttattcaaaattatacgatcggaaatgaaggacttgtctcccgtttccggagatatctttttattctttggtaaaaaccgacaaagtgtaaaaatactgcgttgggatggcgatggctttcttctgtactacaagcgcctcgaaggtggaagttttgagttaccgacatttaaccccaatacaggcaattacgagatttcttatcaggttttgtcttttatcttaaatggagtgtcattaaagtctgtacggttgagaaagcgttttaggatctaattcaacattctgattattagttatttgtgctaaagatatcatctggtttatttggccaattcgttgattttttatatctttatgccatgaaaaaggatgagatcatagagttattgaaggaacaaatcaagggattacgagatgacaacaacagactcttggaccaaatagatgctttgataaaggaggtttcttcccttaaagaggcactccttcaaaaaggcgaatctcttagcaagcaacagcgccttactaagggactcgccaaacttgtatccaacacatccgaacagcaacaggctccccaatctgccatatccgaagaagagcggcagaagatagaagcggaaaaagcagataagcgtaaagcaagaaagaataatggggccaaacgtgacatgcattatgagatggaggaagaagaacatgtcgtttatcccgatgatcccgattttgacatcaataaggcccggttgtttaccactgttcccagaatatgcgtccgctatgaatgtgtacccatgcgcttcatcaagcatgtctacaagatacacacctatacgcaagaaggtcgcctgtttgagggaaaaacaccggcttcggccttcttgaattccagctatgacggttcatttattgccggattgatggaattacgttatatacaatcgctacctgttgaaagaatcatcaactacttcgagagtcatggctttacgctgaagaaacctacggctcataagttgatagagaaagcctcaaacctcttcgaaaatctttataagtgcatccggcagacagctttgagtgatccttataaggcagccgatgaaacctattacaaaatactcgtcccggaaaagaacagcaagggaaaaggagtcaggaagggatacctttgggtggttgtcggcataaacaccaggatgatatacttgctctatgatgacggctcccggtctgaaagagttattcttaacgaattaggcagttgcaaaggtatcatacaaagcgatggttactcaccttaccggaagctcgaaagcgatgcttatcccaatatcacacgcatcccgtgcttgcaacatataaaacggaaatttatagattgcggtgagaaggacccggatgcaaaaaggatcgtggagctgataaacgcactttatcaaaacgagcataagcataaagttggggctgagggatggacggtagaacagaatcttatgcatcgaaaaaagtatgcgccggacatactcggagaaataaaagatgtgcttgatgaaatagaagaacggggggatttattacctaagagcgaactgcaggaagccattacctatcttcgcaatgagtggaatgcagtggtggacatctttaattatggtgacacttatctggacaacaatatggttgaacggatgaaccggtacatatccttatcaagaaaaaactcattgttcttcggcagccataagggggccgaacgaggcgccatactctacacgatagcactcacttgtaggatgcataaagtgaatctatttgagtatctcacggatgtgataaacagaacagccgaatggcaaccgaacacaccaattgagaaatacagggaactgcttcctgacagatgggaaaaggctaatgactaaaaagggatcattagcctttttattttaatacactatatagaatcgcggagacgcttactatctttgtcgattgcttgtccgtggtggtgcccgacgctcctatccacagaatgatagggaaagccacaatcacgcaaaacgcttcataaacaccattcatgcaaagcggctccaacccttccagataaggaacagagaacagggcaatcagcgcaatagtacatatccaaaatgcacctttcaccttcataggcttgaaattgcgcgacataagcatacccaacgaaaaagggaaaagcatacgcaaggaaccgcccaaaaagttaaccccatccagcgtccagcccactcctatgtttccataagtggagacattaaaaacagcaaacgccgccaatgctacgcccagcaacaccacaaacaccgtcagtgccttgttggacaagcggcgaatgaacaacgcatacaggatattgccgatatactcaaaaaacaatgaccagcaaggaccattcaacggaaacatctcaccgttgccacgaacttcgtacccaacacccggcatggcaggaatgaagaagatcgtacaaagcagagacaacattatcatggagatagctacgtgcgtcccgtcccattgcacactcccctgaatacagaacgtgatagcaccgagaacggcacccataatgaccatcggatgaagacgtatcaatcggcgtttaaagaaatctttcatggtgagacttttaccccaacggtcgtcgtaagcataaccgatcacaaaacccgaaaggataaaaaagaaatccacggctaaatatccgtgattcagagtttcaatagcactattactggcaaaagcgaagccctcgaatacgtgataccatatcaccataagagccgccacaccgcgaagtccgtcaagaagatcataatgcgccttggtgtctgaaaaagctgaagcagaaatgttcgacatttgtttttctattagtaagttagtattttcagaaggcaaagatacggtttgcgctacgaagtttctttgctctaaagcaaaaaagccctgctaatcgctattttttagcacgtacccgactaagggtatagatggaaatgcccagaaaagcagccacatatttcagcttcactcggtttatcaatccgggatagcgacggttgaactgttcgtagcgttctttaggcgaaagttggaggcgctccacaaacatgtggctaagctccttattcacattctgatgcaggattcttccccagttggctatgtcgatatatgtttcgtagagggcattcagcttgtcgatgtggatgacgtagattttgcaatcggaaagcgtttcaacgctttctaccgatggttgctgatagtagagcgaatccatgccgaacgtgacatcgccctcctgactgaaccacgtagtggtgtcctctccgttgtggtggaatacggaacgggcgatgccctcttcaatgaaatataccaggcgatctgtgacgcctgcctgaacgatacgggtatctttgggataataccttaattccatattcgcctgaagcgcttgaagtgcttcgtcggaaaccggatagatttgcctgattttacgaatgatattttccatttgggggtaatggcgtattgggggttaatgacgtactttaggatatttattattaaaacggaaaccaagaccgagcatcagataattaggggtctggaaatcctgaagattgtagccgatgtgaaggaatgaactccgggtgacgttgatcttcaacgcaaagacctgatacagtccgcgcaaatcgccacgccccagcacattcgttcccaagccgacaccgatggtaaaaaacggcatcacgtattctgcccgtccggaaagtccgagcgcaagctgattctgaatgcccggcacgagaaatttacgacgggaggaaccactgcctgcatcgtactccaccagcgcatcttcggtgtacacattagcactaccgtcataaacaccgtccagcgaaactccgaaacgcagcttatagttgagattgtacatcggagcaaagttgaatcccgctacgggatagctgcccggtgatgcaatctgcttctcgcctacatagacgcctttgcgacgccacgagccgaacaacacaaggtcataactgacgtgtcgcggaaaacggggaacgtagggatgaaccaatgatttagtgaggtcggcttcttcccggttgaagttgtacaccagtccgattttcgctccggtggtgttgacacctgcattgggaaacttggtgttgccgttggagaaatgcgtgaagtctccgccgatgataaagtcgaaataacgggaaagcgaccagttaaggtagatacccgcattgaggtaggcattcacccgtgagcctacggctccgttgtaggagttgtaatcgttgtcataaggtttccatccggcagaaataccgaaattccactcgtaattgagcgaaaggcggggattgaaacgggcaatgcgtgcaccttgaaagacatagaacgtcatcggatcacccagttgctttttgtcgccaaaggtggtgaaagccaagccgaaaccttgataagctccgccatagatgcggtcggcacaggtgttgggacgaaacttgaaagagtatttcagatgagcggcaaatgaactctggatgggtttccaccgttcgttctcgccttgcaggaaaggattggtggggaacacgtattgcggccgcgcctctatccccaaccggtgaatgaaatggtggggaacgtagggagctacggtgtcggctccgcattgcgggaagctgttgtgccggaagccatgaatttcttcctgcaatctccgcacttcttcacgaagttggcggacgtcctgctggagctgttctacgtcttgccgcatttccttcacctctttctcttcctgccctacctcctgcgcactaagcgaagtgccggggaaaagcaaagcggaacagattacggcgatttcccatctgggtatctttactctcatataatagtctggtttgtcttttcagaacggaagttacaaatggagcttctcaataaactgtgccacatgatagccgtccatcaacccatgatggcaggttacggaaacgggcatcatcagtctttctccgtcacggaagtactttccggtggagattttgggaacgctgtcgcccgaacgcatattggtggggtgcttcatgtcggtgaatgagagccacggcactgccgaataatgaatggcattgggatggaaagtgcctcctttgttgagtcccgtagtggcttgcaaacgttccatttcggcttttgcccggcggataaagacaagttcgttcggatcatattcaaaggtggcaaaagaaaaggtatggtcgtcacggcctacggtggcttcgggcagaaggctgtcatagcacaccaccttatcgccttcgatgcgataacggaattcttctaccgcagcagcggcagtcgttatccgatggaggactaacagggaaaaggatatgcctttggttttggcttcctgatatgcgcgcgtacagtctacctgaacggtcactccgaaaaacggatcgtcaaaagcactgaaatgttcgtaatgttctcttctgttccaagtagcaatatcgatgatcttctctatctgattcattctaaacactcttttttatttgagaaacgcagattaacgcaaattatcgcagatttagcctatttcctttgcggtaatctgcgtttctaaattcagactctttactgatgttgctcacgcaacaagtcgttcactgtttttaccgggttgaaagtggaaagtggcacttctacaaagacggtattccagtcgctcatcgctccgttccacaagccgggaagttcgagagctttcaggtctttgccgttcttcgatttgtaggagatgaagcctgttgctttatctacatacttcaccaggtcgaacttatgtcctttataatcgcgcacggcgcatacgaggtctaccggattgaagtgtgtgcctttctcgaacatttctttcttttccggatcgtccatgtcgatctgtgagctttcgaggatttgcagggagatggttccgtcgctgttgtaagcaaggaacgggccgccaccgggttcgcctacgttcttcaccattccgcagacgcgcatcgggcggttgaacttgtttttcaggtagatggcgagtacggaatcttcgaggtctttcgtctccggattcttgcagaagagtttcttttgcaggaattgaagcatttccatcatctggtcgtgggtgtatttaccgctgtcgagcagggtaaggtattcgaatacttgttcttgcaaagtcacgagcactccggcaatcagtttcttataagtaacggtgtcggctttcagtctgtcgggcactacgttgtcgatgttcttgatgaagataatgtctgcatcgaggtcgttcaggttctcgatcagtgcgccgtggccaccgggacggaacagcagtttgccgttgtcacggaaaggttggttgtccatgtcggcggcaatcgtgtcggtactcggcttttgttcggagaaggtgatgtaatagtctactccatagcgtttggaaaattcgtctaccttttcggctaccagcttcttgaagagttcacggtgttcggtagataccgtgaagtgcacgtttactttaccgctctttccggcagcatacaaggctccttcggcgagatgttcttccatcggcgtgcgtgaaccttcgggatacttatggaatttgagcagacctttcggtagtgcgccgtaattcagtccggctgtttcgagcagggcggataccactgctttatagttgccgtcttcgatcagtccgggaatatcttttccgtcgatacgctggcaggctacattcaggtcatcatagaaagcaaaattcttgattccgtcgaagaatgtctgttcgaacttggtagtcggtcggtcatagtcggcagacaggaactcgaacaggttcttgaacatacgactcgctgcaccggaggcgggcacgaacttcacaacagtcttatctgtgttggtatatgcatcccaggcggccaaataagccttctgttcttctgcatcgggagctaatattccctttccgatggaggctgccgcatccagcttcaaaaaggggaaacccgtctggaagcatgctaattgttctacaatttgctcttccgtgatgcctttcttggcaagcaactctttgtcctgtgtcgttatcataatatctaattttattaattgatgcccaaaaatacaaaatgttatttacttcttgccgaataaccgggaaaaaaactaattttacatcgaattaacaagattgaatatggacgacttttttacatcagaggaaaaaaaggagcttttttcactctaccggcatttgttgcaatctgcaggagatagcatttcctggaaggattgcctaaagttaaagagacatcttatcaaagcggcccagtgtaacggtctgcaacgcaataacttcgggatgaatcccgtcatcagagatttacaaacggcagtgatcgttgccgaggaaatcggtatgaaaggttcgtgcctgatcggtatcatgttgcacgaaatcgtgaaggggcatgtattgtctatcgacgaggtgaacgccgaatatggggatgacgtagcaagtatcatcaagggattggtgaaaacgaacgagctgtatgcgaagagtccggctatcgagtcggaaaacttccgtaatctgctgctttcttttgcggaggatatgcgtgtaatcctgattatgattgcggatcgtgtgaatgtgatgcgccaaatcaaggacacgggcaacgaggaggaccggctcaaagtggcgaacgaggctgcttacctgtatgctccgctggcacataagctgggattgtacaagctgaaatcggaactggaagatttgtctctcaaatatacgcagaaggaaacgtactattttatcaaggataagctgaacgagacgaaggcgtcccgcgacaagtatatcgctgcttttatcgaaccgatccagaggaaggtgtcggaagcaggattgaagttcgacatcaaggggcgtaccaagtcgattcattcgatatggaacaagattcagaagcagaaaacgtcttttgaggggatttatgacttgttcgccatccgtatcatcctcgattcggagccggacccggctaaggagaagcaggaatgctggcaggtttattcgattgttacggatatgtaccagccgaacccgaagcgtctgcgcgactggctctctatcccgaaaagcaatggttacgagtcgttgcacatcactgtgatgggcccggaagggaaatgggtggaagtgcagatacgtacccgccgcatggacgagatcgcggaacgcggattggctgctcactggagatataaaggtatcaagggtgaaacgggtctggacgagtggttgacttctgtgcgggaggcgttggagaatgcagacaacgattcactgaaagtgatggatcagtttaagatggatctctacgaggatgaagtgtttgtcttcacgcccaagggggatttgttcaagctcgccaaaggggctacggtattggattttgctttccatatccatagtaagttgggatgcaagtgtatcggcgcgaaagtgaacggcaagaatgtgcagctcaaacagaaactgaacagcggcgaccaagtggagatcatgacttcaaacacccagacgccgaagcaggactggctgaacatcgtgacgacttccaaagcgcgcaccaagataaggcaggctctcaaagagatggtggcacgccagcacgcttttgccaaggagacgctggaacggaaattcaagaatcgtaagttggaatatgatgaagcgaccatgatgcgcctcatcaagcgtttgggcttcaagaatgtgacggagttttatcagcggattgccgacggtggactggacgttaacgagattctggataagtatgtggagcaacagaagcgggacagtgatacgcacgatgaaattgtgtatcgcagtgccgaagggtataacttgcaggctgcgcaacaagaggaaacgacgtctaaggaagatgttctggtaatcgatcagaatctgaaagggttggaattcaagttggctaaatgttgtaatccgatttacggggatgatgtgtttggtttcgttacggtaagcggtggtatcaagatacaccgggcggactgtccgaatgccaatcagatgcgcgaacgtttcggttatcgtattgtgaaggctcgttgggcggggaaatcggtaggtacgcaatatcctatcacgctgcgggttgtagggcatgatgatattggtatcgtgactaatatcacttctattatatccaaagagaatggtatcacgctgcgctccatcggtattgactcgaacgacggtttgttctccggaacactgacggtcatggtgggtgatacgggacgtttggaggctcttatcaagaaattacgtactataaagggagtaaaacaagttagccggaattaattccggctactctcctatcttactttcttctttatataataaggataggtaatcaatgcaaagaagagtaaagcaatggatgctactatctgtccggtatgtagcatcttatctgtatccaattccatgtagcaggcggtagcgattcccagggaaatgccgatttcggttgccagcagatgggtggtgttggctgttccgcgttggcaatggtgggatagctttacgaacatcaccagaaattccggcaggataaagcctaagcccagtcctaagagtacggaggaaatgcctatggagatgtctgtattcagtagggacatggctacgatttccaatccgagtcctataatgaccagtcgcagtgttttctctttcaggaaaaacagacgtgcaaagaacagggaaacgatgtatccgagggctgttcctacaaagaacggtacggggattcctgtgtttccgagtacgaaatcgtttaggaaagggtgtaccatgggaaccagcagtcccggaatgaaggttatcaggatcagattgatggcaggaacccatccacgaagcaataggaagcggtcgaaggaatagagtttggtgacaatcggcgcacggaaaggtacgtagactcctgataacatgaggattccgacagctccggttatgacagatacagtgagcagggtttggaaggattggctttgataaagccatactccgaggataatgcctgcgatcattcccatacgtgccatccaggagaaactgacgtttcccgcactgcgcagtgtggagttggtgatgtcgatggccaatgtgatgccggctgttgtgcctatgccaaaggcaagcccttgcacggtgcccaacagaatcagttctgtgaggttggtaacaaaggcgtatccgatggtcgccactaccatcagggcagcagcaaacatacagacgtacttacgcttgtatgcatctaccagataggcatggaaaggaccgatgaggaacatccccaaggtgaaaaagagaaagattactcctgtctgtgcagccggcactccgagacggtcggccatctctacggaaagcaccggaaataacacatacaaggatataaacaacagcaaattagctacacatatccgcataaaatgaactgtccacaatttaactgccatatactatatttaatattgttccttctcgttggggaagtagcaattcttcacgtcagaaacgtaacggctgatggcatcggtcatcaccgtgtacaagtcagcataacgacgcaagaaacgcggacggaatccgttgttcatgccaagcatgtcctgaatcaccaatacttgaccgtctacgtggccaccggcaccgataccgataataggtatggtcagttcggatgctacgcgttcggcaagggttgcgggaatcttttcgagtacaatggcaaaacagcctgcttcttctaatagatgggcgtcgcgaatcagtttttcggcttcggcgtcgtctttggcacgcacggtataggtgccgtatttattgatggattgaggcatgagtcccagatgtcccattaccggaatgccagcacatacgatgcgtctcaccgtgtctatgatttcttcaccaccttcgagcttcaaagcgtcagcgtggctttctttcatgatacggatggcagaagcaagtccttccatctcgttgccctgataggatccgaaaggcatatcaaccactaccatcgcacgtttcacgccgcgtaccacggatttggcatgatagatcatttggtcgagtgtgataggaagtgttgtcacattacctgccattacattggaagcggagtcgcctaccaggattacgtccattcccgcaccgtctacaatctgtgccattgtgtaatcataagcagtcagcatagatattttttcacctctctgtttcatttcaaccaggcgatgagtagtcacctttcttgagtcatctgatatataaccagccatgtctttttaaattaaaaattaatgattaaaaattaaaacgacgtcaagcgccttcaaaaatcgcggcaaagttataacatttaattcataacagagaaggaaatgcaaaaaatcctttcaaacacctcgcttggatagctggggaggcggttggaaggattctgtgaggtataataaaagctccttaacaatataaggaagcgatttatcaagtgcaataatgcgtttcggatttattctttctcttaacgatgcaggatcaggagcttgtcgtaggtcatgccggtgaagtcgtctattatataatgtgctttgccagtgatggcttcacgtgtattggtggtggcaagtccgatcactgttgccccggaagtcattccggcttgcaggccgtggaaagaatcttcaaagacgtaggtgttttcgggggtggcttcaaagatttccatcccgagcaggaagcagtcgggagccggtttggaacgggcaaacatctctccggtcaggatgcggtctaccattcctttaaattcggggtgggcattgtagacgttagccatcttctcttcgttggagctggtgactacggctatctttgcaccgttacggcgaagatcggctataaaggcttctactccggggatgtattcgtaggacatcttttgctcgtaaacgtagagttcggcgcttatttcaagctgggcttcgggttggtccgagaaatacttttcatagatttgcaataatgtctgtcccttaatacggcggccgaaatcttcttcattcagatatttccgtccctgctcgtcccagaagactgtgtactgcgtttctgtatccataatgacaccatcaaaatcgaagagtgccgcaatcgttttcgttgtattcatatataaactttctttttacctaaacgttaaaccttgtgtatccgtcgttgcaaagttccgaataatcatcgaatcaggcaaataattcgtacctttgcaaagctaaaaaaaacgtaacatacgtttttatccaacaaaatctactagcgcatgagcaagaacgacccacatatcttaggcaaagaaagtatcggcaaattgctgttacaatattccattcctgcaattatcggaatgacgattacttctatctataatattattgatagtatcttcatcggacatggtgtaggcccaatggcgattgccggactagccatcagctttccgctgatgaatctggtggtggctttctgtacattggtatcggcgggcggttctacgctggcgtctatccgtctggggcaaaaggacatgaagggggctacggaaatcttgtcacacacgttgatgctctgtatcactaattcgttcttctttggtattttgtctttcatcttcctggatgatatattggttttcttcggggccagtagagagacgcttccttatgcgcggagctttatgcaggtgatcttattgggtactcctatcacttatacgatgattgggttgaacaacgtgatgcgtgctaccggatacccgaaaaaggcgatgttgacttcgatggtgacggtggtagcgaacattatcctcgctcctatctttattttccactttgaatggggaatgaggggagctgctacggcaacggtgatttcacagttgatcggtatggtgtgggtggtgagccattttgtcaagaaagacagtacggtgcattttgaggggaatatctggaagatgaaacggaggattgtggagagtatcttcgccatcggtatgtctcctttcctgatgaatgtgtgtgcgtgtgccattgtgattatcatcaataacagtctgcaaaattacgggggcgatatggcgattggtgcttatgggattattaaccgtttgctgacgctttatgtgatgattgtgttaggtctgacgatgggtatgcagcctattgtggggtataacttcggagcacagaagatagaccgtgtgaaacagacattgcgactggggattatctccggggtcgtgattaccagtagcgggtttattatctgcgagttcttccctcatgccgtatcggctcttttcacggatagcgatgaattgattgatttggccgtagacggtatccggctggctgtattgatgttcccgtttgtaggggcgcagattgtgattggtaacttcttccaaagtatcgggaaggctaaaataagtattttcctttcgctgacgcgacagttgctttatcttttgccttgcttgctgctctttcccaactggtggggattggaaggtatctggattagtatgccggtatcggatgcattggcgtttattacggcggttgtcagtctgatgatttacattaagaaagtgtctaaacaacatccggaaacggtagcggaataaagcattaactgctttactccgcctgttggtttttattctttattctgctttgatgctctttacggggttttcattggcaacgtgccaggctttcactaccacgcaagccacgataaccaatagtaccagcagggctattcctataaaaagtaacagatccatatcaattcgttcgctaaactgttccaaccatatttggcctgtaaaataggaagcggcagtacctatcagcacagagattacggagatattcagaatgtcgtatatcaatagtttcaggatgccggaggactctgccccattcactttgcgtatggctatttccttgctgcggcgttgagtttctccattcacatagccaatcaatcccgtgatgacaataagcaggatgaagcaggacgaaatccagactgcgttacggaaacggtatacgctcttatagccttcgcgaatcatgctgtctactgaattgaaattcagggctacattcgggaatgtttttgccacacattcgttcaagcgtttcaggttctcgtcatagggttcttttagacgaacattgatggtgtgattggccgattctttatcggcaatcaatacgataggagactgactggaatagaaacttctattacgaatatcatcaaacactcccacgatggtaccttctaccccactcactgattttcctacggcaccatcggtccatttcatcaaacgaacgagttctttatttaccaatagatcgccttttttcttgatggtagtgccttctgttattctgattcccatcacattcggataatcatagtcgcacatattgaaattaagggtggcaatgcgtttgccgtcgttaccaatcaatccacgtgtccaatattctcccagtacgctgtgtgtggatgccgataccccgtccaccatcggttggcggagcaactcgtcttttacatgttctactgtttcgccggacatccaggtttcggcttctaccagtcccggaatcttgattcccatatctccattcatcaggtaagaatattgtaacagggtaaccagcaatagtccgagtacaaaggaggtacccgtgaactggacaaatagtaatgaacgtttccatcctctttttccatccgtatagtgccggaatacctgcgtgacgggaatacgtgagaacagttttcccggtatgcctcctgccaggaggaaaaggactactacagtgagcaagggtatccaaatgatgtcccaggcaaacagtgaggcaaggctggttcccaacaggtcttcgatcaattcgcccatgttgattatcaacaggaagctaaacaggacggatagtagaaccaatactccggtttctgccagaaacatgccaaagatgtttccggaactggctccactgcatttatgcactcctacgctttttgcacgacgactgatagtggctattgaaatcaacatataattcatgatggctacaaaaaacactgaaaagccgaggaagccgaatatcatcaaacgtttctgggtatcggcagaatccagatggcgtttcgaaagaggaacaacgctgtattccaacttccagtcatcccattgcaaggggctgtattttgccattacttgttgagttttgctgttcaccttgtctatatccgacgcatgacgcaagcgtgcaaaggcataaaagatatcattcccattccaaccgttaccactcgcatagcgaccatcgcggtggatggtaatcacaaagtcacgggagagcatcgaattttcgggtatgtctttatagacgccgcgaattgtgagctccaactgcttgtcggccgaaagggttttcccaataggggctgcgctaccgaatgtttcacgggcaaaatgttctgatacaaatatgctattcgagatgatgagatctttcgcgttcccttttagtacgggtatacccatcgtttcaaagaaacaggtgtcgaccatcatgtaatttgcttttgacagcagtttgtcttccttataaatatgataaaactggaaaggaagtacacaggtggctgattctatttcttcaggcatatcctgcgccagggtaaaagctaccggatcacagacggtatagtcataattcattccgtcatcaccctgcacttcgccggtcgtcatattctgtgccgctattctcgccattatcagattctccgcttccgggtaacatttctcatagctcatctcaaaagctatttgcgagaaaagcaagatgccaactgttagtcctaaagaaagggagagcactcttacgatattcaaagtacgctcatgcagtaatgtacgtatgctataatagatttgtctcatacttgcttctgatctggtttatgctatcacactggctaccacgctgccgtcgaacaaatgaactgtacgatgggcaaaggatgcgtcatgttgtgagtgtgtcaccatgatgatggttgttccttctttattcagttcggtcaacaggttcatcacttctgccccattctttgaatcgaggttaccggtcggctcatcggcgagaatcagtttcggattggtcactacggcacgggcaatggcgacacgttgttgctgaccaccggaaagttgttgcggaaagtgtttggcacgatggctgatgttcatccgtttcagaatgtcttctaccatgcggcggcgttcggatgctttaaagcccaggtatgtcagaggaagttctacattctcgtaaacattcagctcgtcgatcaggttaaagctctggaatacgaatccgagtttgcccttacgcacatgggtacgttctttctctttcaatccgcccacttcttcacccatcaagcggtaggaaccttcggtggggttatcgagcaaacccagaatattcaacaaagtggatttaccacaaccggaggggcccataatggctacaaactctccctcttttacttcaaggtttacgtgattcaaggcaactgtctctacttcggaagtacggaatactttactgatgttgtttatttcaatcatactctttttatttatgtttttaattattcacttttaaggctattcaccggattttcattggcaatccgccacgatttccaaagtacgcagactacgataacgagaagatttacaatcgctatcagtacatacgccgcccaactgacaggcacgtgctcggcaaacatatccatccacatatcattgacgtaccatgatgccgccacaccgatcacaacggctgcaacggctacataaagcacatctttcaccagcatttccagaatgccggaggcttcggcaccattgactttacgtatggcaatctctttggaacggcggcggacttcatcggttgtgtagcctatcaatcccatcatcatcacaaagaacatggtaaccgccgccagtatggtagcattgctgaaaacgcggatggagttataactctcttttatcatctgctccatcgaacggaaatcgaccgttttatcggggaaagcgtctgccgatactttattcagtttctgaaggttctctgcaaaaggttctttcagccggacatgaacacagtttccgaaattcttggtactcatcaggatgaagggtgcttgcgggttggtgaaattaccgatccggaagtctttaatcactcccactactttacatacgtagcctgaattatagacagtacggttcaatagctctgttccccagtgcatccattcgccgtatgtttcattgatggctacttcgttttcattccgtggcatacgcccctccttcatcaccatacccatcatctttggatagtcttccatcatttcgcaaaaacgggaggagaaaagtgattgtccactttcatcctgaatcatcgttccactataactatagacgggatgggaatcggcactggacacggactctacataaggcaggccacggaagaaagtcagggcatagtcctggttttctttattgccgaaatcagtattggctacgacaacgcgcttcggattgtatcccaggtctttgttcaagacatagtagtattgcagcatcaccacatacatcaatccgcagatgaaagctacgccagcaaactgcacgaataatagcgggcatttccagcctttctttccttctgtgtagcggcggaagacttgtgaaacggggattctggcaaagatgcgtccgggcagtgctcctcctatcaggaacaggatagctaccgtcagcaggggtacccaaagacggtctaaagagaacagggctccgagttcaacggcggttgtgtcttctataaagtcgcggaagttcagtaagattaatcccatcaatagcaaggcgaagagaataatgatagctgtttccaataggaacattcccagaattttgccgctgcctgcaccgctacacttatgtacgccgatggctttggcgcggtatgagagtgaagaaatggagatcagtacgtagttcaaagtagcgatgaaaaggatgattattcccaagatagacatgatgttccgcatccgcttcacgtccggttcttccctgtatacatcacggatcggctttacaaaagcggtataacctaccactttctggtcttccgcaggacgatatttctttatcaggtcattcaaccgtgcattcaccacggatttgtctgctccgggacgaaaacggataaatgcgatccagctatcgcctcctctccaggagtagtttccccatccacggctccatacggtaggcagagaaatcactgcatccggtctgacggtagcattttcaggtatgtcggcgtacgtgcctttcactgtcagttctatttctttattataggagattactttgcctatcgggttttcttggtcgaacatcttacgcgccaaccggtcactaagaaagacaacatctttctgcatcagttctttttccggaacaccgctcaaaacatcgatacccatagtttgaaagaatagtgaatcggctgtcactttgttagcttcaaaacggacacttccataataaagaggggcactcatccagacacaatagctggtggctgcttccacttctttaggaaagttctcctgtatggcacccgccaccgatccgcagttcatttcctgcggctcaaaggtttggccattggcggaaaagacggagaagatctgatacaggttatcataatctttgaagcatttgtcaaagctctgttcgaaagccacgcgggcaaacaacaggatgctcatcgtcagccccaacgccaaagagaggattttgataacgttggaaccatgcccccgcaataaagtacggatcacataatagatttgtttcatattatattttatttctgttttttctattttcaagaatgcagaaagcatgccaaaaaagaataacaattcattatcaagtgtttatcatttcaacctttctgaatattgtctaaaaattagacagtaccgtctaatttttagacaaccgggagactattccatttctcctttaaattgttccaacagtctctattatccatggggagattgtccatcccgatagaaaactttatctttgcatctagttttctaaactattaaagtaatgatgaagaggaagaatttatatgcactgttttcgtgcctgttcctttcgggatgcggtatgatagactatcatccgtatgacgtccgcatcagcggagaaacagaggtcaacgcccacaatatggaaagaatagaagcaaattgccagggtaaaactacgatacggttcgtgacaatgggcgactcacaacgatggtatgacgaaacggaagattttgtaaaagcaatcaatcaacgaaatgatattgacttcgttatccacggaggggatatgagtgacttcggactgactaaggaatttctttggcaaagggatatcatgaacggacttcatgtgccttatgtggctctgatcggaaatcatgactgtctgggaacgggagcggaaacctacaaggctgtattcggccccacaaacttctctttcatcgcaggagatgtgaagtttgtctgcctgaataccaacgctttggagtatgattactccgaacctgtaccggactttacctttatggaaaatgagataacgaacaggcgggatgagtttgaaaaaacggtcatttgtatgcacgcgcgtccctatacggatgtgttcaatgataatgtggcaaaagtattccaacactatgtcaaacagtatgcaggaatacagttctgcacggccgcccatacccatcaccatcaggacgatatgatttttgatgatggaatacattatgttaccagtgattgtatggattaccgtacttatctggtatttacaataactccggaaaaatacgaatatgagctggttaaatactaattatatcttacgcgcgggagtactgtccgtgcttctcctgcttcccggtctgatgtctgctacctgcaagagggatacaatcatcaacaactacaaggatgattcgctccgttttatcatcaaggatgattcaattatcacctttcgtaacggggagtcttcattcaccattatcaaagcggactccgtgttgcctgccacaccgaagcacaccaaacatacccgctacgataatcgggttcaccgtttccgcagaaactgggaacggattatcccgactcattccaaaatacaatatgccggaaatatgggattgctctctttcggtacaggatgggattatggaaaacgtaatcagtgggaaacggatgtattgctcggattcattccgaaatattcttcgaagaaagcaaaagtgaccatgacgctcaagcagaactatatgccctggagcattaatattggaaaaggattctcgacagagcctcttgcctgtggtctttatgtgaataccgtatttggaaatcagttctgggtgaacgaaccggaacgttatccgaaagggtattatggtttctcaagcaaagtgcgtttccatgtctttatgggacaacgcctgacctatgacattgacccgcaacgtagatttatggccaagtctgtaacctttttctatgaaataagtacgtgtgacctttatgtgattagtgcggtaaacaatagttatctccgtccacgtgactaccttagtttatcattcggattgaagttccagtggttatgattggagatacaagggggataaaatcaattttgaattacgattcttgaattatcacatccttttttcgtaagtttgcgctttacaaacttgaacgaaaatgagtaaatctggaacaatcatcattgtagacgacaataaaggggtgctgactgccatacaaatccttttaaaaagttatttctcaaaggtcgttgcactctcctcgcctgtcaccctgacgagcgtcctacgggaggaaataccggaagtggtattgctggacatgaatttcacatcgggcatcaataccggcaatgagggattattctggttacatgaaataaaaaaagtacgtccggatcttccggtcgtactttttacggcttatgccgatattgaactggctatccggggtattaaagagggagcaacggactttatcgtcaaaccctgggacaaccagaaactggtggaaacactgcaaatcgcagcaacctctacgcacaacgacaggaaaacggcaagtaaagaaaagcctgttcactcgcctatgtactggggagaaagcaaggttatgcaacaactacgggctttgattgaaaaggttgccgtcaccgatgccaacctcttgataacgggtgaaaacggaacgggaaaagagatgctggcacgggaaatccatgtgctttccaaccgcaaatataaagaaatgattgctgtggatatgggaaccatcaccgaatctttattcgagagtgagcttttcggacatgtaaaagggtcgttcactgatgcacacaccgaccggacaggtaagttcgaggctgccgaaaagagtacgctgtttctcgacgaaataggaaacttgccctaccatctgcaagcaaagctactaaccgccatccaacggcgaagcattgtgaaagtgggaagtaacacgccaattcctattgatatccgactgatatgtgccacgaaccggaacctgcaggagatggtagcgaaaggcgaattccgggaagacttgctctaccgcatcaataccattcatgtggaaattcctcccctgcgcgaacggaaagaggatattatcccattggccgaacgatttatggttcacttctgcaagcaatatgacaagtcgttgatgaagttcactcccgaagcaaaggataaattgactgcgcatccctggtatggtaatatccgcgaattggagcacgtcatcgaaaaggcggttatcatcaatgacagtccgctgattcctgctgaattattccaattatccgtaccacggatagccattcaggaacagagtatctccaccctggaagaaatggaagtgcagatgatacggaaagcgctcgatgcctgtgcgggaaatctatcggcagtggccgctcaactgggaataacccggcagacgctctataacaagatgaaaaaattcggattatgagctcacagatccaacaactggggattcggtactggttcagagttttgctgactgtacttttctgtatatcgactgtctggttcggtattcatcaatcatacggttggctgggcgtcagtctttgtctgctggtacttagcatcatctggcaaatccgcctgtaccagcttcacaccaagcaggtgcttttcatgattaacgcgcttgaaaataatgataacacttttcattttcccgaagaaaacggtactcccgaaagccaaaagatcaaccgggcactcaaccgggtgggacatatcttatataatgtaaaagcggaaaccgcacaacaagagaaatattacgagctgattctggattttgtcagtacaggattgctggtactcaatgacaatggggctgtttatcagaagaacaaggaggcactccgtcttttggggctgaatatattcacgcatatccatcagttgagtaaagtagacactacgctcatggagaaaatagagaactgccgtcccggagacaaactgcaagtgatatttcacaacgaacggggaaccgttaatctatccatacgtgtatcggaaatcaatgtgcgcaaagagcatctgcgtattctggctctgaacgacatcaataccgaactcgatgaaaaggaaatagattcatggattcgcctgacacgggttctgacgcatgaaatcatgaattcggtcactcctatcacttctctttgtgacactcttctttccatgtccgaggataaagacgaagagatcagtcacgggttgcagaccatcagcaccacaggaaaagggttgctctcttttgtagaatcttaccggcagtttacacgcatacctgcaccggaaccgtcattgttctacgtgaaagcgttcatagaaaggatgattgaacttgcccgccatcagaatccgtgtgacaccatttgtttccacacggagatttctcctgcggacttaattctgtatgcggatgaaaacctcatcgcccaggtggttatcaatcttctgaagaatgccatccaggcaatcggcagccagccggatggtagaatcgagcttcgggcttattgcaatgatatggaagaaatatggatcgagatcaaaaacaacggtcctgaaatcccgtcggaaatagcagaacatatctttattcctttcttcaccaccaaagaaaatggtagcggaatcggacttagtatttcacgacagatcatgcgtctttcgggcgggagtctcactttgctgcgggagaaagaaacaacgtttattttaaaattcaaataactattgatatatgatacctgcactcgtcaacaatcccttattccgggagatcactccggaaagactttttgccgatctggaagagatcagtttccatacacgttcttataagaaaggagaaatcctggctcaacagggagctgtgtgtaatcgcctcgtcatcctgaccaaaggaagcgtgcgtggagagatgattgattattcggggcgtcttatcaaagtggaggacatcgccgctccaagagcgattgcccctctgtttctgttcggtgaggaaaaccgttatccggtggaagtgactgccaatgaaccgacagaggttatcgaacttcctaaatcaagtgtattgagtttattccgcaaaaacgagcagtttttggaaaactatatgaatctttctgccaattatgcacgaaccttatcggataagcttttctttatgtcgttcaaaacgattcgtcagaaacttgcttcgtacctgctccgattatataaacagcagcaacaaacgcatatcaccctcgaccgttcacaacaggaattgagtgattatttcggggtatcccgtccttccctcgcccgcgaactggcgcacatgcaggaagatggattattgatagccgatcgcaagcatatcactattttacagaaagaagaactggtacggcttatccaataataggaactgttttaaggatttatgaattgaataatgagtgttttagataaaaaatattcattgttgtaacattggttacagaatcagctgaaacctttcctctacttttgcgttcaataaataaaatattggactaattaaaaacgtaaaagttatgagtatgttctgttatcaatgtcaagaaaccgcaatgggtaccggctgtaccttgaaaggtgtgtgcggtaaaacgtctgaagtggctaacctgcaagatttactactcttcgtagtacgtggaattgctgtctacaacgaacatctgcgtaaagatggacatccttccgaacaagcagacaaatttatctatgatgctttgttcattaccatcaccaacgccaattttgataaagtggctatcactgaaaaaataaaagaaggactgaaactgaaaaaagaacttgccaacaaggtaaagatcgaaaatgctcccgacgaatgtctttggaatggaagcgaagatgagtttgaagagaaatcaaaaactgtcggtgtgcttcgcacttccaacgaggatatccgctcactgaaagaacttgtacactatggcctgaaaggaatggctgcctacgtagagcatgcgcataacctgggctacgagtcaccggaaatatttgctttcatgcaacatgccttgtctgaactgacccgcaatgatattacagtggaagaactggttcagctgactttggaaacaggaaagcatggagtatcggcaatggcacagctggataaggcgaacaccagcagctacggaaatccggaaatttcacaagtgagtctcggtgtacgcaataatccgggtatattaatcagcggacatgacttgaaagacctggaagagttattggaacaaacagagggtacaggagtagatgtatatactcacagcgaaatgttgcctgcacattattatcctcaactaaagaagtacaagcatctggcaggaaactacggaaacgcctggtggaagcagaaagaggaatttgaaagtttcaacggtcctatcttgttcacaagtaactgtatcgttccgccacgtgcaaatgccagctacaaggatcgtatttacatcacaggagcctgcggcttagaaggggcacattacatccccgaacgcaaagacggaaaaccgaaagatttttctgcactaattgctcatgctaagcaatgtcagccaccggtagccattgaaaacggaacaattatcggaggattcgcgcatgcacaggtgacagccctggcagataaagtggtggacgccgtgaaaagcggagctatccgtaaattctttgtaatggcaggatgcgacggacgtatgaagagccgtgaatactatacggaatttgctcaaaaattacctggtgacaccgtgattcttactgccggttgtgccaagtacagatataataaactggctttaggtgatatcaacggcattccgagagtgttggatgcaggacaatgtaacgacagttactcattggccgtcatcgctttaaaactgaaagaaatcttcggattggatgatgtgaatcagttgcctatcgtatacaacatcgcttggtacgaacaaaaggcggtcattgttttattggcattactggctttgggagtgaaacacattcatttgggtcctacacttcccgctttcctttcaccgaatgtcaggaacgtattgatcgaacaattcgggatcggaggtatcagtacagtggatgaagatattgtgaagtttctatcataaatgataaggaaacagaagggtattttacaagcagattctcttctacaaaatagtgacggtatttgataaggatagtgacggtatacaacaaccataccgtcactatttccatcatataccgtcactatctttttttctatattaggaggactcctgcttaatcaggagtcctgcgtttactcccgcatagtggatgtttttttgaatagaatttcaatcctctctgggtaatattaaattgagaactactcccaccaaagctgccagtccaatgccggacaatgaaaaatcgccccaattaaaagcagcgccaccaatgccgacagtcagtgtcaaagatacaatgattatatttctggtacggctcaaatcaatgcaattattcacaagattaccaatacccgcgcaagcaatcgttccgaaaagcaataacatgatgccgcccagtaccgcacttggaatggatcttaataatgcactgattttaccgataacggagaataagatagcggaaatggcagctattcggatcacttgcggattagtaatctttgtcagtgacatggctcctgtcacttccgaataggtagtcacaggaggcccacccagcaatccggcacagaaacacgccagaccatcccctaataaagtacggtgcaaccccggatctttcacgaaatcttttccggtgaccgtattaacgacataaatatcaccaatatgttctatcaccggagcaatggctaccggaatcataaacaacacaggttcccatgagaacttaggaaagacaaactgcggcaatccaatccaggcagcatccctgacaccggacaaatccaaatcgtagaaaagccatgcagccagataccctactacaattccacagaagataggaatcagtttcaaaagccctttggctttcattgaaacaacgactgcggtaaccaacgaaagcagtgccagtacccagttctcttttgccatattcactcctgttcccgccagtgacaaacctatcagaatgataacaggacctatgacaacgggaggaaagagctgttcaatcaccctcactccctgccatttgacaagcgcactcattacaaagtaaactaatgctactccaaccatgccggataaggtgccgggcaacccataaagttctgtcgctttaatgataggcgcaataaacgcgaaactactccccagaaaaacaggaacctttccacgcgtaaccgcatgaaagataagcgtaccaatacctgctgtaaacagagctgtagaagggtcaagccctaccaataacggcacgagtaccgtagcaccgaaagctacaaacaagaattgtacccccaccacccctttcctcaaaggtgtaagattatttgaatccataagtataatgtagattattctttgcaaaattagtctttttagacaatttaactcccttttttcacaaaaatacatccaaaaagagtttttatttgttgttaataatgtgtaacttcgcacggtgagaattaatacgacaattttataactttataatatattgcctatgatatttacagcagaaaacaccctacttatcggttctatcttacttttcgtcagcatcgttgttggaaaaaccggataccgctttggagtacctaccttattattgttcctcgtagtaggaatgttgtttggaagtgacggcctcggcctgcagttccacgacgcgaaagacgcccaatttatcggtatggtggcccttagtattatccttttctcgggaggtatggatacgaaattcagagaaatcaaacctattctaggtcccggtatcgtgctttccactgtcggagtactacttacagctcttttcaccggactctttatctggtggatatcaggtatgagctggtcaaatatttatttacctatcactacttccctgcttttggcctccaccatgtcgtctacggattcggcttcggtgttcgccattctccgttcacagaagatgaacttgaaacacaaccttcgtcccatgctggaactggagagcggaagtaatgacccgatggcctatatgcttaccattgtcctgatacagtttattcaatcgtcaggtatggaagtcggagctatcgtaggctctttcgtcatccagtttatcgtcggcgcggctgccggatatgtacttggaaagctagctatccggatgttgaataagctcaatattgataatcaagccttgtatcccatcttattactggcatttgtgtttttcactttctccatcaccgacttactgaaaggtaacggataccttgccgtatatatcgccggtatcatggtgggaaacaataaaatcatgcaccgtaaggatatctacacctttatggacggactgacctggttgtcgcaaatcatcatgttcctttgcctgggattgcttgtcaacccgcacgaaatgctcgaagtagctgccgtggcattattgattggtgttttcatgattattatcgggcgcccgttaagcgtgttcctttgtctgcttccattccggaaaatcacgatgaaatcacgtattttcgtatcctgggtaggattacgcggtgcagttcctatcatctttgctacctatccggtagtggcaggcgtagaaggttcgaacctcattttcaacattgttttctttattaccatcgtctcattggtcgtacagggaacaaccatttctttcgtcgcccggattttgaatctttccaaaccgctggaaaaaaccggtaacgacttcggagtggaacttccggaagaaatagactctgaccttagtgacatgactatcactaaaagtatgctggaagaagcagacacattgaaagatatgaatcttccgaaaggcacactggtaatgattgtgaagcgtggagatgagttcctgattcccaacggaacgctgaaactgcatgaaggagataaactgttacttatttccgaaaaatccaaagaagaagatactgattcagaataacatcagaaaagagttattcagtacactataactgattcgtttccacgcatggaacctcttgccttggcaagacattcgtttcatcttcatgcgtggagacgaaatgttttatataggccaatgaactagttctaaggaagaaacacgaatgacctttatccggctgataaaattgttcgctccccctccgttaattaaccgtaaaacttgaatttaaaattcggtttacatctacgaagtattaattttgcgcagttttaaactaaatgtgcaaaaatcgaatggaacaagaacatcagttcattgattatattgagcaaagcatcatcaaaaactgggacaaagatgccttaactgactataaaggaattaccctccaatataaggatgtagcgcgtaaaatcgctaaatttcacatcgtcttggagagtgccggcatccagccgggagataaaatagccgtttgcggacgtaacagtgctcactgggcagttactttcctggcgactatcacttacggagctgttattgttcccattttgcatgaattcaaggcagataatattcataatatcgtcaaccattccgaagccaaattacttttcgtcggcgaccaggcatgggagaacctgaatgaagatgccatgcctttgttagagggcatcgcttcgctggctgatttctcggcattagtgtcccggaacgaaaaactcacttacgcttttgaacatcggaacgctatttacggtcaacagtatcccaagaactttcgaccggaacatatttgttaccggaaagatcgtccggaagaactggctatcatcaactatacttccggtaccacgggttactctaaaggagtgatgctcccctatcgcagtctttggtcaaacgtggcttattgcttcgaaatgcttcccgttaaaccgggagaccatatcgtttccatgttgcctatgggacacgtgttcggtatggtatatgatttcctttacggattctctgcaggtgcacacatctatttcctgacgcgtatgccgtctccgaaaatcatttcccaatctttctccgaaattaaacccaaagtgatttcttgtgtaccgttgattgtggaaaagattatcaagaaagatattcttcctaaagtagacagcaaaatcggcaagttattgctgaaagtgcctattgtgaacgataaaatcaaatcgctggcacgacaggctgccatggaaatcttcggtggaaactttgacgagattattatcggaggtgctcctttcaatgcggaagtagaggctttccttaaaaagatagggttcccctacaccatcgcttacggtatgacggaatgtggtccgattatttgttccagccgttgggaaacactgaaacttgcttcctgcggaaaggcaaccagccgaatggaagtccgtattgactcaccggacccgaaaacacatgctggagaaatcgtatgcagaggaatgaatatgatgctgggatattataaaaatccggaagctacggcgcaaattattgatgctaacggttggctgcataccggtgacctcggtacgttggatgaagagggttatgtgacagtccgcggacgtagtaagaacctgcttctcacctctagcggacagaatatctatcccgaagaaattgaaagcaagctgaacaacatgccgtatgtttcggagtcactgatcgtcttacagcacgaaaagctggtagcactgatctacccggatttcgacgatgctttcgctcatggattgcagcagacggatattcagaaagtaatggaacaaaaccgtatcgaattgaatcaacagcttcctaactattctcaaataagcaaaataaagatccatttcgaggaatttgaaaagactgcgaaaaagtcaatcaaacgctttatgtatcaggaagcaaagggataattatcccggataagcacgataagtatccatgcaataattctcatagtattagcacggattatataaactgataatgagaacatgcttaataataaaaacggtggacagtgttgaggctgttcaccgtttttcctaacctctaactaactttatttatactacctgtttttctatcttcctacctaaaaacgaatcctatttccattattaacagtctaactttataatcaatcgatctttttaaagtgccataaatgaaatagcctgtccgcctccggcagccattcgtatgttcaacgtattttcagaagtaaccgtttgttccgttatctggtaatccgtaggatttgatttccaatccgcattctctccatccgcatagatgacagctttatactgtttgcccagttccaggaaatccagttttatttccagtgtacggggtttctcgttcgttgctgctcccaagaaatagttgccttttgctttacgcacgatggctacgaattcccccggttctcctgccaatgctttcgattcgtcacaatccggatcgaaatcgcggaagaactggaaagccggatggccttcataattttcaatcatatcagatgccatctgcaagggagaatacaaaatcacccagttagcaagctgtttcgccaatgttgtattcacacggctgtttcctttatcctgatcgttccatttctggcgacggggagaatctttggtgttcagaaacaaaatatcaaacgtacccggtgtataatccagcggaccggacagcatacgggtgaacggcaacatgacatgatgagacggaggatttccttcgctccatgcattccattccatccctctcactccttcacgtgtcatcatattaggccatgtacgacggataccggtatctttaataggttcgtgcgcatccagcgtcattttatgacgggcagctgtttccaccactttctgatagtggttgactccatattggctgtgatgaagataaccattcgggaaagctcccacatatcctgtcttcaggacatggataccgtagtctgtgtaccattgcatagcatgatccatctggcgctcatagttgggaatattccctccggtctcgtgatggccgataacttcaactcctttttcctttgcataacgaaccacttcatcaatgtcaaagtcagcatacggtttcgtaaagtcaaagttttgcataccaccccagctttcccagccttcattccaaccttcaaacaaaacgccttcaatctgattggcagcggcaaaatcaatgtatttcttggcattgacagtagtggctccatgacgttcatccatcttccaggtttctacgccgagatgcatcccccaccatacacctacatatttcatcggacgaatccaatcggtcgtttctattttacttggttcattcagatttaaaatcatagccgaattaatcagactaacggcatccggaacaatctgaatagtacgccaggaagtagtgaaatgattacctttacgcactttcacaccatcaggccatggagcaagttcagctttcaacgtatagtttcctgcctgcttcaaagtcatttccgagaaatcgtacaatgccgcttcatgaatacttccgtagacgccatcggcagttttaaaggtgaaaggagtattggctatctccacctcggaaatgggacgttgcgcataaagcaattcataagtttcggcactggcaggaatagaccatgatgtaccgtcctgacgaaaacggaaagttgtcagttcatccgtaatcaatagggaatccgctgcgggcacattatattcataacgaaaccctaccccatcatcaaacacacggaaacggagagttaactccacctgatctttattgaccagatttaccgccatctcattataatgatttctattggttttattttcaccccatggttgcgtccatgtttcatctttactgtcgaaagtcgtgttttttatctgaaatccttcgcccaggtcgataccgtttttctctgtaaatcccaatgtcgaattttcaatcaacaatgagtcacctactaaaatgttatacaatggtttaccgttgtcatctactgttaaagccattttgatatgaccgtccggcgatttcacttctgttttcggactgctacacccgtaacatcccagcacacacagaaaagctccaatgacataatttattttcatagcatatctattgtttgtatatagtacaactcaaaaagaagaaacacttaaatgtagggcggatttctttctccggatgccaggaaaaaagtatctttgcacataaacaatctgaattatggcaaagatactattggttgaagatgaaattaacatcgcctctttcatcgaacggggactcaaagaattcgggcattcggtaaccgtctgccatgacggggatacgggttggaaaatccttcaggacaaacctttcgaccttttaatactggacattatcatgcctaaaataaatggtatggagctttgccgactttatcgccaaatgttcgggtatcaaatcccggtaatcatgctgacagctttaggaacaaccgaagacatcgtcaaaggactggatgcgggagcagatgattatctcgtcaaaccttttagtttccaagaactggaagcacgcatcaaagccctgttgagacgcaacaaagaagtcccttccaatctattgacatgcgataacctggtattggactgcaatactcgaaaagccaaaaggggggacatagacatcgaccttaccgttaaagaataccgcctgctcgaatatttcatgactcatcaaggggttgccctctcacgtattaccctgctcaaagatgtatgggacaagaattttgataccaataccaatatcgtagatgtttacgtaaactatctccgggtaaagattgaccgtgactttgataaaaagctgattcatacagtcgtaggactaggatatatcatgaatacttaaactcccaagcacaccggctatgaaaataggttctaaaatagctctcttctatacattaatcagtgtactgaccactgtcatcatcattgctgtattctatattttcagtacgcagtacatcaataaactttatgcttcttacctgcgtgaaaaagcctacctgaccgcacagaagcattgggaaaaagatgaagtagacgaacagagctaccagattatccaacgcaaatatgacgaactcctgcccgaagcccatgagattcttttaaatatggacagtctctccgaagtgcgtgatacgctgaataaatacctcacgcaacaccagcaggctcttctgctggcaggacaggacagcatccctttctccttcaaatataaggatcaactgggagccgccctttattatccggataatgaaggcaactttatcgtactcgtcatgtcccggaatgcctacggaacagaaatcaaggaacacttattgttgctttccatatttctcatcttagccagttccgtcctgatcttttttatcggaaaaatatattccggccgtattctggttcccctgcaacacatactaaaggaattgaaaagaatacgcgccaacagtctgaaccgccgattaaagactactggcaataatgacgaactggaggacatgataaagacattaaatagtatgctcgaccgtttggacagtgcattcaaggcagaaaaatcctttgtcagtcacgcttcacatgagttgaacaatccgattactgccattcagggagaatgtgaaatcagtctgctgaaagaaagaagcacgggagaatacattgaatccctccaacgaatttcttcggaaagcaaacggttatccagcctgatccggcatcttctttttctttcacgacaagaagaagaactcctgaaaaacaatattgaagagattattctggctgatatattaaaagagttgacagcttccgatgaaagaatccatcttcatttggaagagacagaccggcagatgactgtaaaagccaatccgtatctgttgaagatagcattaaaaaatataatagataacgcctgcaaatactctgataaagaagtaaatgtgactctctaccgggagcaacaacaagtcattcttgatatagaagaccggggaatcggtattccacaagaagaaatagaacacatattccagtctttctatcggggcagtaatacccgggactatgccggacaaggcatcggacttagcctgaccctgaaaatcatttctgcttatcatgcaaagctggatatatcttcagaaatagaaaaaggaacaaaagtacgggtgattttttaatcacccttcttttatccctttctctctctacctactgaaaactacaaatttaatctatgaacgttttttccacagaatagaaatgaactaaatacgtctttgcaataactttccgtttttatcatataacattcgttcatataccatttctacgataagaggaaaaacaaacaaggcaaagaaagtcgctcctatcaatccgccgataatgacaatcgccaacggacgttgtgattccgaaccaattccatgactcatggcagcgggcatcaaaccgatagctgccattgccgctgtcataatcacagggcggatacgcgagcgcactccttccttagtggctttctccaagggcgagccgagttttagattcgcctttatatcggaaatcataatcaccccgttctgaatacaaataccaaacaaggcaataaaaccgataccggcagaaatggagaagttgaactgcgttatcagaagagccacaataccacccacggcagcgaacggtacattcagcaataccagtcccgcatcccgcgcattagagaatagaataaacaggatgataaaaatgatagcaatactgatagggacaacctgtgccagacgtttcgttgcacgttgctggttctcaaaatcgcccgtccatttcagtgaataacctgccggcaaatgtacggaagcattcacctttttctgcgcctcggcaactgccgtacccatatcacgacctctcaccgagaatttcactgcacagaaacgagcgtgattatcacggaatatcaataacggtcccgtaatcgtcgttatatctgccaattctttgataggtaccatcgttccatccatcgccggaaccaatatcttacctatctcctcttcattctgacggaattgttcgctgtatcttaccatgatattaaacttccgctcatcctcatacaacagtgaagccgattttccgccaatagccatttcgataattgattgcacatcttccttagcaaccccataacgcgccaattggcgttcattcaactctatacgaagctccggctgaccgatgttccgaatcacacccaagtcttcaatcccttgaaccgtacccaggattttctctatctgaaccgcatatttctccgactcatacaaatctttaccaaacactttcaccgcaatagatcctttcacaccggaagctgcttcctccacattatcggtaatcggttgtgagaaattgaagtcaataccgggataaatggataaatcatcctgcatcttatcaatcagttccagttttgtcaacttactctcccattccttttcgggataaatatcaacgtggaactcgatattatagaatccggtagcatctgtaccgtcattcggtcgtccggtttgcgacagcacttgccgcacttccggaaacgttaatagtttctttctcattttattggcaagagtcaccgattcatccaacgaaatgctctgtggcaaggtagcacgaatatagatagatccctcattcaactgcggaaggaactccgtacccaggaaagagaaaagccataatccgacacctgctattacggttgccattccgatagtcagcttcctgtgcgcatagaataaatcaaaaagagccgaacactttgcattgataaaatggacaaaacggttatttttctcacgaacattctttttcagtaacatggaagacatcaccggaaccaatgtcaatgtaaagatcaaagctcccaacagtgcaaagcccaacgtgtatgccaaaggagagaacatctttccttctaccttctggaaagagaagataggaatcaatgcagtgatgataatcaatttggagaagaaaaccgcttttgccttgtcttttgccgtgtgacggatcaagcccattttagacatcacattaaaagccggcatccccacttccctcgctttcttgtccaaagccacaaacactccttccaccatcaccacggccccatcaataataataccgaagtctatggctcccatagaaagcagattggcggacattcccatcacccgtaaacagataaatgcgaacaaaagggctaatgggataacgacagcaacaatcacggtagtccgccaatctgccataaagatcaatacaataaacgtaaccaataatattccttcaatcaggttatgcgtcacagtctttaccgccagattcaccaagtcctcccggtcatagaatgccactatcttcacatctttcggaagcacattctgattcaagtcttctattttatctttcaggtttgcaatcacctcacccggattctctcctttccgcatgactacaatcccctgtacaacatcattttcatccattcggcccacttgtcccaaacgaggcagacaggattcgtgtacatcggcaagattcttcaccagaatcggagtgccattgatgtttttcactacgatatttctcaattcatccagatcgttaatcaaaccgattccacgaaccacataagcttgcgaacttttagtgataacatctcctcctacattgatattacttttagctatcgcatcatacagttccaaagaggtaatgccataattaatcaactggtgaggattcacacttacctcaaacgtcttcacctctccgccgaagctcacaatatccgctacgccggatactgaacggagattacgttcaatcacccaatcctgaatcgttttcagttcccgcacactgcgcttgtcactacgaagcgtataacggaatatttctcccgtcggtccatacagaggttgtacttccggagttaccccgtccggaaggtcggcatcattcaataaattatatacctgttgacgtgctgtgaaatcatcgacacgatcttcaaacattacattgatgacagaaagcccgaaaagagtggtggaacgaatatccgttttcttctgaacgggattcatcgcaatctcaacaggaatggtgataaacttctctacctcttcggcactacgccccggccattgcgtgataatcgtcactttcgtattcgtcacatccgggaaagcatctatcggagtatgtttaaaggaaacagctccggctataacggcaatcgctgtacagaagaaaataaagaatttattcttcagcgagaaagccactatattatctatgaatttgtgcatactattttctgtttttaatctgcattcaacgcattatataccaacaatacattattattcagcactctgtctccctcggaaagtccggaacggatatagcactccttgctcaactgcttgtacacatccacctctttcacctgcaaacgctgatccggctccaccacgaccacataattctttcctccttcaaataccagtgcatgagcatcaatacgaggcatggaaattccatccgctttacatttcacacttacattcgtaaacatccccggtttcaacaaatattcttcattcttcaatttgatgcggacattcatcgttttactttcattattcaacaaatgatacaccttatcaatcgtaccggcaaacatcttatccggataagccaacgtagaaatgcgtacggaggcaccttcggaaaccttactgatatcgctttcatacacatccgccatcacccatacgtctgacaaccccgaaatcgtgaacagttcttcactctgatccggacgcaactgcatatccctgctgatttgtttctccacaataaaccccgaaacgggagatttcagctgataataagcatttccggagaaattataaatagagaaaacatcctttattcttctttcttcggcttcggcacttatcaactcctgcttcgcctgaagtacatctttatccgaagccatcccggaagcatacatatcctgcgtagcatccatatttctgcgtgccagcaataattgttgttccgcctccttcaattgcttttcataatctgccacttctccactgcggatgactgccaacacatctcccttacgaacaaagtctcctatttcagccttcagttccgttaccgtacctccaaacatcggatatacatgtgccacctgattctcattaaaagtgacccgcccgtttaatgccagttcgtcaatcacctcttgaacgtgaaccgtatcgacagatacaatcctcaataagctatctgtcaggcataagacagccggttcaacattcgtttgttctcctttaccggagcatgctcccaatacggtagtaagcaatatgcaaggaaggaatttattccagttcatagtctttgataatttatgaatattagtagttcaatatagtttgtccgatagttgcattcaggttttccatcgccaggaaaacatctttctttatttcatgtaactgaatacaagtttctttatagctgtcatagtaatcgataaactccaacaagctgatatttcgtttcttaaagttctcattcactcctgctatcagtttttcgaagttacgttccagttccatattggtagattgataaagctgaactgctttatccagtgaagcataagcagtataaagctccatatctgcacggttagccgcattttcctgttccgctcctgcctgctggatactaaaacgggcagctttcacatttccctggttgcggttgaaaataggtactgacaagctcactcctattgcaaaatagttattgataaagtttccggcacggtcataactaccattcaccgaaaattccggaaatgccattgatttctgcaatttcagatttgcacgggaagcactgaccgtactccgggcaatcttgagatccggccgttcattcaccatcgctttcaagtcggcgaacgatagttgagacaaatccaattgcttcaacacctcttcatccagtgataactcaaccatcgtgtctcccggaagatttaacaagacattaagttcccctctaagggttaacaactcgttttcccgttcattcttctctttcttcaaagagaacaacatagattccagacgggacatttccatcaatgaaatatttcctttctcctgttgcagtttcattccggcaagtaactcttgcagagaattcacttccttctcataaatggatatggatttcgagagaaaatagacttgtacaaacttctcattcagctcctgacgaagtgttctcatcacctcttcaaactgatattctgctatttctttgttgattttctccagtttcacctgcttattccgttgtccggcaagacgaattacctgttcaattcccacaaccatttcaccctccttaccaaaatcaaaatactttccgttcaggcggttataaacattctgttctaacgagattaccggattctcaaataatttggcttgcagcacttgtgcctgtgccatatcaatgttataccgttcggctatcagtgataagttacgttccagaaaacgttgttccgcctctttcagcgttaatgttcctgtggtagcctgttgcgcgcatattcctcctgtcagcagaagaaaaaaagaaattagaaatactctgttcattactatatttatctttatgaccttattgtagttgtcgcggcaaaattacaattctgtagccggagagacgggaaaaagtcattataagcctctcatatcagattagaatttgattagaaaacagccatagaaggaagaattgtaaacacaacaggaaaaatggctatccttcttttatcccaactcccctatctttgcagtagagaaaatgaaatgaaccattaaaaatagaatatatgaaaataatagatttaaccaaagatagttttgtagagaaggtagctgattatcaatcttatcctgataactggaacttcaaagggaataaaccttgcctggtcgattttcatgccccgtggtgcgtctattgcaaagcgttatcgcctatattagaccaactagctaaagaatacgaagggaaattagatatttataaagtagatgtcgatcaggaaccggaattggaaagtgcatttaaaatccgcaccattcccaacctgttactttgcccgctgaacggcaaaccgacaatgaaattaggcactatgaataaaaaccaattgaaagaactgatagaaaccagtttactttcagaataaaaatacattaaaagtccgggatacttctgatgatgataaactgccggacttttgatatcatacagaacattggcttttataatctgcgttttattattcattatgaccctcctctttggagattatttcaactattctttatgcaacagaatatcagttcccggaacaatctttcccatcgaccatacacatcgtacattcaactccttatcaagaatcacaatatcggcatcctttccctttgccaacgcccctttccggtcactcactccaattaaacgggcaggagtttcagaagccatacgcacagcatcttccaaaggaatattggctttcttcaccatggtgcgaaccaatacatccatcgtagccaaactaccggccaacgcagaatgatccgccatcttgcatacgccatcctctatgatataacgaggatcaatcggttcattcccttcataagcggcatacgccaaagcatcggtaacaagacaggtattctccacgcctttcaacttataaactagtttcaggatagtggcaggcaagtgaataccatccgcaatcacttccacggtcattccatccgtcagatacacactttccactgtaccctcatatttatattcacggcgtttatggaaacccggcatcgcattatagaaatgagcggcgtgagaaaatcctactgcaaatgcagctttaatttcatcatattcggcttcggtatgtgtaacagcagtcataattcctttcgaacgggtatactttgcaaaatcatgtgcaccgggtagttcgggactaatatcccaacgtctgatgcaagacgtacgcgccaataaaggaatatattcattttcatccggagttttcagaaaaccgtcatactgtgttcccgccatcttcggattcaagtaaggaccttcgatatgcaggccaagaacaggagaatccttctctttcatcaggttttcacagacatcaactgcctggtagattctttcgaacgaggtagatgataatgtaggaaatatcccggtagcaccatgtttcagatgtgcagtagttgccgtgcggaatgcttcttccgttgcttccgtataatcatgtccgccacctccatgtgcatgcatacttacaaatccgggcacaatcgtcatccctctggcatcaataaccgttgcaccgataaccgccaaatcactgttggtcacctctaatatttttccatcacaaatcaatacggaaccatctttcaaccagccttgcggggtcaatattcttccatttattatttgagtcaacatagttttcgttatttattagatttaaaacagtttattggtgccttctaccagttctcccatcgcccatacagctctcacattcaagtctctgtctaaagcaattatatcggcatccttgccacgctccagcgttcctttacggtcgagtactcccataatccgggcaggagtttcggaggccattctcacggcatcctccaaaggtatttccgccttctgcaccatggtacgaatcagtcgatccatcgttgcaatacttcccgccagtgctgaatggtctgccagcttacatactccgtcctcgataatcacacgcggatcaaaagccacctgactatcactggcggcacaagccaatgcatccgttatcagacaagtgcgttccactccttttatcttgtaaacaaggcgcaagattgttggaggcacatgaataccgtctgccaccacttccactgtcatatcatcaatcagataaatactttctaccgtaccttcatacttgtactctttccgtttatggaatcccggcattgcattataaaaatgagtggcatgcgtatatcccgcctcataggctgtctgtatatcctcaaattctgcctgggtatgtcctaccgaagccaacacccctttcgctgtgatatatttaccaaattgcatggctccgggaagttccggtgcggcatcccaacgtttgatacaatgagtttcttccagcaacggaatatattcttcgggatcgggatctttgatattttcgggaatctgtccacctgccatcgccatattgaaataatgtccttccagatgaagcccgagcacagggctattaggctccgccatcattttctctgtagtttccgcggctgcacggatcattggaatggtagaagaagaaagagtaggaaaaatactggtagtgccatgctgcatatgagctttgattgctgtccggaaagcctcttcggtgccttccataaagtctcttccaccgccaccgtgaacatggatttctacacctcccggaacaatatacattcctttggcatcaatcagtttggctccgataattgcaaggtcacaattggttacttccagaattttattgtcacgaataagaactgacccatccttcaaccagccttgcggggtgaggatgcgtgcattaataatctgtgttaacatatcacaaatagttaaattaattaaaggtctgtgtgaatcaatgacgctcttttttggggggagtacattgattttttcgtttgcaaaattacgcttttccgttcaatctatcgatacaatcgtccggtaaacttccaatattatacaaaaaaaggttgccaatcttatcgactgacaacctcatcttatatggagcggaaaacgagactcgaactcgcgaccctaaccttggcaaggttatgctctaccaactgagctatttccgcaaactaaatttcgtcattcagaaatctgaaagattggtgcccagaacaggactcgaacctgcatgcctctcgacacacgcacctgaaacgtgcgcgtctaccaattccgccacctgggcaaaacttagttccattatttcaaagaaacaagagcggaaaacgagactcgaactcgcgaccctaaccttggcaaggttatgctctaccaactgagctatttccgcatttcactttcataaactgtgaagaggaggagactcgaactcccacaacatttctgtcactaccacctcaaagtagcgcgtctaccaattccgccacctctccataattttaaagtttaacctttgtgcccagaacaggactcgaacctgcatgcctctcgacacacgcacctgaaacgtgcgcgtctaccaattccgccacctgggcaaagattattgttccaacatttcaaagaaacatgagcggaaaacgagactcgaactcgcgaccctaaccttggcaaggttatgctctaccaactgagctatttccgcattttttcgtttgcggttgcaaaggtagggattttccgtaaacatgcaaacattctgcctacttttttcacagaaatctgttcactttgcacctaccgcaaaacaatcattttgattatcaactcattcggtcacgataatcttcataagaaaattgcttgtatatttcagctttcccctcttttgtccaaatggcaatggcaggatgatgaattccgttaaacatatttgtcttgaccatcgtataatgaatcatatcttcgaacacgatacgctctccgatttgcaactcgtgatcgaagctccacagtcccatataatcaccgctcaaacaggaatttcctccgagacgataaatatattttccttcatttcccatctctgcaccacgcacggcaggttgatatggcatctccagacaatccggcatgtggcaagtgaaactaacattcaaaatagccgtcttgataccacgactttccacaatatccaccacttcggaagtcagcactcccgtctgccaggtaaaggccgaaccgggctccaggataatgcgcaaatgaggatagcgtgcttttaatccttgcaacagtcttatcaaatgttcggtatcataatccttacgagtcatcaggtgtccaccacccagattcaaccatttaatctgtggaaaccaatgggcaaatttagcttcaagatgttccaatgtacgttccagctcataagaagaagattcacagtgacaatgacaatgaaagccttcaataccttgcggtaatgcttcgggcaacaaatcggctgttatcccaaaacgtgtgccgggtgcacatggattataaagttcggtttccacttccgaatattcaggatttacgcggataccacaagagatgccacttccttctgcaaccaccatcggatagaagcgttcaaactgctgcattgagttgaatgtgatatgactgctgcaacgcatgatttccgggaaatcctgttccgtataagcaggagaatatgtatgcgccttgctgccgaactcttccaatgccaaacgggcttcatacaccgaacttgccgtagaatgatctatatattcacggaatatggggaaagagcgccacatggcaaatgacttgaaagcaagaataatctccactcccgccctgtcggccacgctttttatcaaacacaggttctttcttaaaagctcttcttccatgatgtaacaaggagaagggaactgattaaaatctatcatatataaattattatctaaaataacgccttacgaacgtggatgcaaaaatacaaattcaaaagcaaagagggattgttttatttttaattaagatattggttttcgcgaactttttcttatttttacacctttataatctataagtagttatatcatcctaaatacctgattgaatatgaataaagatttaagaaaagtagtgatcctgctggcacatccaaacatgaaaggatctcaagcaaacaaggcattaattgatgccgttggtgacattgaaggagtagccgtattcaacctttacgaattatcgcctgacatcgctttcaatgtagacgaatggagtaaaatcatctctgatgcctctgctgtgatctatcagtttcctttctattggatgtctgcaccgtcattactaaagaaatggcaggatgaagtctttactttcctatccaagactccggcagtcgccggtaaaccgctgacagtggtaacaactaccggatctgaattcgatgcttaccgcagcggaggaaggaatggtttcactatggacgaacttttacgcccttatcagggcagtgctatccattcaggtatggtgtggcagactcctatcgttgtttatggaatgggaacagcggatgcgggaaagaatatcgctgaaggagcaaatacatacagacagcgggtagagatgctggtcaatagcagtaacgccggaaataattggtaagactatgaaaagcgtagctttagattagataaagctacgctttacagatgctaaagcatagctttaggtatggttttaggtatagtcttatttcggtatgaaagcaacttctccaacctagttttatctccggaatttgttatctttaatcggcaagtttaaaacttacgggaatagcatatttaaccttcaccggtttatccatctgtgtccccggtttccacttcggcataagcctgataacacggatagcttctttatccaaataaggatcaatgcttttgaggatagtcagattggttacagagccattcttatcaaccacaactcctacaatcaccctcccctgtatgccatttttgcgagctatttccggatactgaatattcttcttaatgaaatcaagcatagcgcgtacacctcctggaaattccggcataacctccaccatatcataaaccagttcttccacctgttccccaaccgtctgatgagtgttgtcctgcttcattgtcaacaatccttcgggtaaaggcgttctttttgcctctttccattccttctcattgtccgacaatctaaattcagccatcatcaagacaggtttcctgttgatggtcacctcgtaaaaataacggtaacgtccggctttattcggatgcacatccggataaagcgaagccctcatctcccgttctctcttatcctgtataacataagctatgctaacaaaagcggtattcataggcaattcccaccagatccccttttcatcttcaaaagtaacataataacgttctccacattctattgttccaccgctgtagttattgagaatgaatgttacctgttctgcagctgtagaataaaccggatattcgggacggatataaataccgtttatatggttcacacccactttttgattgataatcggctctgtcacaccactaaattgaaaagcaggcgagtccataatcttctcccggaattctttttgtttttcgggagtattcacaatcagacggatttctatatgtcgcaatcctacaccatatcccgttacattcctttttatattctcatatcccgactcttccattttcttatttaactccttctggatagcgagcaactgggtttgcgagtaattactaccacccataagttccagcctgaaattcttacttccggaagccttttccaatatctgccgtgctttgactgtatctcctgtgacctgaaaaacaagagtagctttatcaaaatagataccttcaataaagtcggggcagttgggagtttccaaagacaacccggctatatgaggttcattaccataaaccttacccagtgtatccaatatttccataccctccgactggtcatagaactgttctgtactgtcattttcagttttgcatgtttctacatggtttgtcttgtttatcctacaggatgaaaacaaacacaacaataagataaaataaaatttattcattatctttttcctcctgtttttcaggtttttatcatttaccaacaaagataataatattacgatttcatgatactaatagatgccctaataattatacatcatgacagaaataatattattgcagaaaaagtgagtcagcactgcttatgaaaagaaaaagatactccgaaaagagtgacgctatcccaccaacatagtgacggtatatgcttaggatagcgtcactattccaggcatataccgtcactatgtttaaaccggatattcgggctgttatttctagtttccgcgctgtgtaggcagggtaaattcttgcgaatcacaaatcactccattctcgtccgccactgcgacacggaatgtcacttcaccgtctttcaatttttcacctgcgtgaatggaagcggtataacggatgccttcacccggaagaatttcctccaccatcacagaaggagaaatgccgagatgcttcaccttccccaccgtttctaccacaggaactacattataaacaggatttctcccttcattcataatctcaaagattatcttgctattttctcccgcatcaatcacatgactacgattatcatctataaaacggatcttgcgcaacttcagttgagaaataggctgctgcaccggctgcttcttatatttttgcacacggacttccctcacttcaggaatatacgcatcttcctctatttgctcttgtctcggcgccgtcaacgcgtttccaatagccgcaccggcaatggttcccacaatattcccaatagcagaaccacggtaaccgcccctccagccatgattattatctccgataagtccgcctatcgaacttcccagactacctccgatagaagcacctgccatgatagctcccggatttcccatacgccccgacgcacatccactcaaaatcaaagcggaaagcaaaattactgttagttgtttcttcatgagtctctctatttagtgttattatttattctaccactttaaaacgagcgaaacgtaataatagttgtttgtctcccgcatttttaaaatgaatagttgctttcgcattgtctcccgttccttctactttaatcacttcacccaatccgaaacgttcgtgctctatcatctgtccggcctgtactcctgctaccgatggcgaagtggaagaggttgcctgtgcaccgctacttgggctaacagtactaactttcttcaaattcctcggtacgctgggagcaatgatctgtgctttcggacgttcacgctgttcggaagatgtacttccgaaaggagcacgcgacggagaagcagaacgggtgaatcctccttcaatctctctacggaaacgtcccgcaccttcatcgacagcacgactcactcctgcctcatgcggcaattgcaagtaatgaacatcgatatcacgcaagaaacgactggggcttccaaattccatccttccataacggaaacgggttttggcaaaagacagataacaatgttcctccgcacgagtaatagctacatagaacaaacgacgttcttcttccagtgcccggggagaatctcctaccatcccactgggaaacaggttttcttccagaccgaccacaaatacattcttaaactccaatcctttagccgaatgaactgtcatcaacgttatcttttccccatcatccgccttgtcggaatcctgatcggtaagcaatgcaatctccgaaaggaaatcggtaagagacacattcgggttaccctcctcctgccgcaaagcgcagaagtcattcattccattcaccaactcttctatattttctttacggcttaggttctcgggggatgtgtcctgacagacatcgttgataatgccggactgacggatgatattcgttcctatttcataagcgttcttatctgcctgatcgacaatgaaaccttctatcaattcacgaaagccttgcagttttgcatgcgttcctttatttatatccagtccgtaactcaatggttcgcagagtgccgcccaaagacttacgccatgatcggtagccgccgatataatcttcccgactgtcgtatctccaataccacgagccggataattaatgattcgcttgaatgcttcttcatcattcggattcactaccaaacggaaataagcaatcacatcttttatctcttttcgctggtagaacgaaagtcctccgtaaatcttataaggtatactccgtttccgaagagcctcttcaaaaatacggctttgtgcattcgtacgatacaggatggcaaaatcagcatatccgtagcgatactcccgtcgtagctctgcaatcttattagctacaatatctccctcttccacatcgctatacgcctgaaatacgccgataggttcccccttttctttctccgaaaacacggctttccgtatctggcgttcattcttctcaatcaagctgttggcagcacaaacaatggtttgtgtggaacggtaattctgctccagtttaaagactttcgtattgggatagatttttgtaaaatagagaatattgtcaatatccgccccacggaaagaatagatactttgcgcatcgtctcccactacacagacccgttgattttctttagtcagttgcaggacaatgctatgctgcgcataattcgtatcctgatactcatctaccagcacataacggaactgatcccggtagcgtgccaacacttccggaaagtcacggaataaaatataggtgtacaccagtaaatcatcgaaatccattgcacctgcctgacgacatctgtcccaataacgagtatagatatcacggatagcaggcatcttggcagccatatctccttcgtaagcctctttattggcagcgtatcccgtaggagtgaccaaatggtttttggcattggagatgcgtgcctgcactactcccggtttataagttttctcgtccaatcccatctctttgatgatggaacggagcagactcttactatcagccgtatcatagatggtgaactgggaagtgaacccgataaatgttgcttcggcacgaagaatccgtgagaagatggaatggaaagtccccatccacaaataacgtgcccgttccatacctacctgacgggcaatacgctctttcatctcgcgcgccgccttattcgtaaaggtcagtgcaaggatattccacggattgtagccgttctcctgttccagcaagtaagcgattttataagtcaatacgcgcgtcttccccgaacctgcaccggctatcaccagcgaaggaccgtcattataagtcactgcagcacactgactctcgttcaattcatctatataattggtattcataacagcattataaaaacaatgtggatttttaacaaacccttggcattcaaatttgttctcaatacaaaagtataatattcattcgagaatgaaggtatttttatgaattttcatcactaactattttaacctaacaccaaaaagcaatgaaaagaagtatatttttatcgattattttgagtttgtttctggtcgcctgcattccacaggcaatggcacaaaagcagagccgcctggaaaagctgctaaagtatctgaacgataatgacgccgacaaatggcagaaaaaccgtgataagatagatgacgagacacaaacctattatgccgaggaactggcattattggatgtgctcaacggattgtggaacgagcaaagcgaacaggctgccaccaactatttcggatgctacgaaagggcaacgaaagcttattttcccaatatctgtgaagaagagaaaatacaactttccaacgtacaaaacaaagcggaactggctgttatctccattctggaagcttcgaaagatcaaatcccttttagcaagacgttgatggacagtatccagtcaagcggttatccgggagattctaccatcttgcaaaaggtacgggacatccgtgaaatggctttactggaaggtatgctgaaaacacctacgctgaatatttatcaaacgtacatcacggaatatccgaacggcaaatttatctctcaaatcaacactgcggaaaacaaacggctttaccagattgtaaagagtaatccgacatcagcgaatttcaaggcattttttgataacgccaacatgcagaaattcttcacggataaagatacgcgtccattccttccggaagtccgcgcgttatacgatgattttctgtttcaagggatcgacagcctccgggagaaaggaaacgcaacagacatccggcagattattgacgagtataagcaatcaccttacctgacttctacagcacgtactcatctggacgaccttgaatatcttagtgaaaaagctgattttgagcttttaaaagctgccattgtcaattccgaatctttgagtatgctgcaggattttctttgcacacacaggtataaggaatttcgtgaccaggccaatgcactacggacaccgtttattctgcaaacaatcatatccactcctacttctgtgaaatactataatggaggacgattgattaagtctgcggaaaatgacagtacgggaaatacctcgaccacttattcgtatgatgataaggggcagctcatttctacattgtcgcttaccgtaaagaacggtcagccaagcaatgaaatacaaacgaacagattatacgatccgcaaggtcactgcatctttgaagtgcaaacgaatccgaaaaccaaaacggatctctaccgacggacacgccgtatcggtacggacggaagtatcgagagtgattcgctcaagtatacagatggaagagtcatcataagttcctataataaacaggggttattgaccgaaaccaaagagtataataagaatggagaacttcaggcgtacaccgcaaacaaatatgatgataaaggcagattgatttcatcccaacatcaaaacctgctttttgcaaattcttcggatcagattatttcacaaaaagatgcttatgaatacgataaatacggttatctgacacaaatcgtttaccaacggattttaggcaataaccagaaaacatcgggatgcctgacctgcctgtacgataaatacggaaaccagatcgatagcaattcttattatgaatatgataatacgggccaatggatctgccggaccgaccgtgagcatccaaaagaagtggaacgcatacagtacatttacaaataaagtaagatgctgtgaacattttgcaaagggcttctgttattatagtataacaagccaattaaaacttgtaacattatgaatactatattaatgtctttaattatgatgaccatgacttacgaaatgcctaaacttccttacgctaacaatgcgttggaacctgtaatcagtcagcaaacaatagatttccattacggaaaacatctacaaacgtatgtaaataatctgaatagcctcgtgcccggaacagaatatgaaggtaaaacggtagaagaaatcgttgcagccgcaccggatggagctatattcaataacgccggacaagtattgaaccacaacctgtacttcctgcaatttgccccgaaaccttcaaagaaggagccggccggtaaactgggagaagccatcaaacgtgactttggcagttttgaaaacttcaagaaagaattcaatgcagcagcagtcggattgtttggttcaggatgggcttggctatccgtagataaagacggtaaactgaaaatcactaaagaggggaacggcagcaatccggtacgtgccggtttgaaaccacttcttggatttgacgtttgggaacactcctattatctggattaccagaaccgccgtgccgaccacgtaaacgccctgtgggatatcatcgactgggatgtggttgaaaaaagaatgtaatcaaatttacaagctaaactatacttatggaaaaggtcgttgtgtttttcacagcgaccttttttacagattaaaaagaacagacttttattgtatatcagatgcattagttgtatttttgcaactcataaaacaacataacaaacaattatggtactgtataaaagaaaaaaaatacgatttattgtctccattgccgtactccttttcctccccttttttagcaatgttggcaatgctgccaccacagaagaatctgaggaagaaatcctgtttatcacctcttataattctgacactaaatatacctacgataacatcagcacatttatagagacctacacccaattgggaggaagatattcgaccatggtagaaaatatgaatgcaacagacttaacgcaggcgcatcaatggaaaaaaacattgaccgatattctggacaaacatccgaaagccaaattagttattctcctgggtggtgaagcatggagcagtttcctccatctcgaagatgaaaagtacaagcagcttcctgttttctgtgcaatggcatcacgcaacggaatacgtattccggaggattcaaccgacatccgaagctataatcccgaaagcattaacttaatggaacgcatgaaggaatacaacgtaagatattgtagcacatacgaatatgacattaaaaaagatattgaaatgatacaggatttctatccggaaacagaacaccttgtatttgtatcggataacacatacaacggacttgccgaactggcatggttcaagaaaaacctgcaacatttcccacagttgtctatcacctacgtcgatggccgcatccatacactcgatatggctgccagtcaattgcgcaatcttcccagaaacacagtcatgttgcttggcatctggagaatcgataaccggggtattacttacatgaataactccgtttatgctttttccaaagccaatcctctcctgcctatgttcagcatgacttccactgcaataggttactgggctatcggaggatatgtcccgcaatatgaaggagtgggacaaagcatgggagaatatgcctaccgctttttagaccagaaggaaactgatatcagcagtatcaatatcttacccaacagatataaatttgatgcgaagaaactaaaggaatggggatttgaaaacaagaagttacctgttaactcaatggtaatcaatcagcccatcccattctttgtggcctataagacagaagtacaattcatcctgattatatttctcgtattagtaggaagtctaatgatttcgctgtattactattaccggactaaaatcctgaagaatcaccttgaaagaactacgaaacaactacgggaagataaaaagaagttggaagagtctgaagtcgaattgcgtgatgctaaagagcgcgccgaagaagctaaccaactgaaaagtgcctttgtttcgaatatgagccacgagatacggactccgctaaatgctattgtcggtttctccagtctgattatcggttcggtagagcagaataacgaactgaaagaatacgcagatattgtccagaccaactccaatctgttgctccaactgattagtgatgtactggatatatcacgcctggaatcaggaaaactgcaattcaactatgaatggtgtgagctggtgaaccattgccagaatatgattactctgaccaaccggaacaagacaatggatgtagacattaaactgcaaatgcctaaagagccttacatgctctacacagatcccttgcgcctgcagcagattattatcaatctgctgaacaatgccttgaaattcactcctgccggaggaagtattacgctggattatgaagtggacgaaaaaaagcaatgtatgctgttctcggtaactgataccggcaccggaatccccgaagataaacaggagctggtattccaacgtttcgaaaagctgaatgagttcgtacagggtacaggattgggactggctatctgcaaactgaccatccaatatatgggaggtgatatctggattgacaagaattacaaaaatggtgcccggtttatcttttctcatcctatcaaaaaacaggaatcaacagaaaaatgaaaaaaaatcgaatgatttagtgtttttctgtttctttttcacttactttgcccccgtaaagacaaaggggtgccccatgaggggctgagattataccctaggaacctgaggcagttagtactgacgtagggattgtgtttcttcttatcgcctttccattcaagcacgctctttgtatttactttcaacttatttattctgataggacaatgaaagtacaagtgaacaacaaagaggtggaaattactcccgactctacccttacacaactgacagcacagctcgaacttccggttcaaggcattgctatcgccgtaaacaacaaaatgattccccgtaccgaatgggagggtttcatattgcatgagaacgataacctggtgattatcaaagctgcttgcggaggataaaggaatggtcagtctacaatttatcacgcatcagaccgaacggtactcgtacctcgaatcggcacgtatggcactcgaaggcgggtgcaaatggatccaactacgcatgaaagaggctcctctcgaagaagtggaggcagtagccctgcaactgaaaccgctttgtaaagagcacgaagcaatcctggttctggacgatcacgttgaactggcgcgaaagctggaagtggacggtgtgcatctgggcaaaaaggatatgcctatcgaccaggcccgccaaattcttggagaggctttcattatcggcggcactgcaaatacattcgaagatgttgtacagcactatcgtgccggtgccgattatcttggcatcggtcctttccggtttactaccaccaaaaagaatttaagccctgtactgggattggaaggctattcctccatcctttcacagatgaaagaggcgaatatcgaaatccccgtagtagcgattggaggaatcacttatgaggatattcctgccatacttcacacaggagtaaacgggatagccctgtcgggaaccattctcggagcggataatccgatagaagaaacacgtagaatcctgaatcatgcgtaaagcaatgatgtacaatcagtaatttaatttataatatatatagaatggaaaagttagtaattgcgggacgcgaatttaactcccgtcttttcctgggaacaggaaaattcaattccaatgaagtaatggaacaagctattctggcttcaggcacggaaatggttactgttgccatgaaacgaatcgacatggacaacaaagaggatgacatgctgaaacatattattcatccgaatattcagctattgcccaatacttccggtgtacgtaatgcagaagaggctgtttttgcagcacagttggctcgtgaagcctttggaacaaactggctgaaactggaaattcacccggacccacgctatctgctccctgactctatcgagacactgaaagccacggaagaactggtaaaactgggttttatcgtgttgccttattgtcaggctgaccctgtactctgcaaacgtctggaagaagcgggcgcagctaccgttatgccgctcggtgcaccaatcggtaccaataaaggattgcagaccaaagaattcctgcaaatcattatcgaacaggcaggtatcccggtagtcgtagatgcgggtatcggtgcacccagtcatgctgccgaagcaatggaactgggagcttccgctgtattagttaataccgcaatagccgttgccggaaatccggtagaaatggcaaaagcattcaaagcggctacagaagccggaagacaggcttacgaagcaggattaggattacaagccgtcgacttcgtggcagaagcaagttcacctctaacggcttttcttgattaaaaacgaataaactatggaacaaaaaataaaattcccccgctcgcagaaagtctatttacccggtaaactttatccgaatatccgtgtagcgatgcggaaagtggaacaagtgcccagtgtcagctttgaaggcgaagaaaagatagtaacaccgaacccggagatatatgtatatgataccagcggaccgttcagcgatgcagatatgagcattgatcttaaaaaaggactgccccgtatgcgtgaagaatggattgtaggccgtggtgatgtggaacaacttcccgaaattacttcggaatacggacaaatgagaagggacgataaaagtctcgatcacttacgtttcgagcacatcgctctgccctatcgcgctaaaaaaggagaagcaatcactcaaatggcatacgccaaaagagggattatcacccctgaaatggaatatgtagcaatccgcgagaacatgaattgcgaggaattgggaattaagacccacattactccagaatttgtccgtcaggagattgcagaaggacgtgctgtattaccggccaatatcaaccacccggaagctgaaccgatgattatcggacgcaacttccttgtgaaaatcaatacgaatatcggaaattcggctactacctcaagcatagatgaagaagtggagaaagcattgtggagctgcaaatggggtggcgataccttgatggatctttccacaggagaaaatatccatgaaacacgcgaatggattatccgtaattgtcccgtacccgtcggcacggttcctatttatcaggcacttgaaaaggtgaacggcatagtggaagacctcacctgggaaatctaccgggatacattgattgaacaatgcgaacaaggtgtagattacttcaccattcatgcagggatccgccgccataatgttcatcttgccgataagcggttgtgcggtattgtcagccgtggaggaagcataatgagtaaatggtgtctcgtacacgatcaggaaagtttcttatacgatcactttgatgatatttgtgatatcctagcacaatatgatgtagccgtttctttaggcgacggacttcgtccgggttctatctacgatgcgaacgatgaagcgcagttcgccgaactggataccatgggagaattagtgcttcgtgcctgggataagaatgttcaggcatttattgaaggccccggacacgttccgatgcataaaatcaaagagaacatggaacgtcagattgaaaaatgccatgacgccccattctatacactcggcccgttggtgacggatattgctcccggatacgaccatatcacttctgctatcggtgccgcacaaatcggatggctgggtacggctatgctttgttatgtcactccgaaagaacaccttgccttacccgacaaagaggatgtacgcgtaggagtcattacctacaagatagccgctcatgccgctgacctggcaaaaggacacccgggtgcacaggtacgagacaacgcattgagtaaagctcgctatgagttccgctggaaagatcagttcgacctgtctctcgacccggagcgggcgcagacctatttccgtgcaggacatcatatcgatggagaatattgtacgatgtgcggacctaatttctgtgcaatgagattgtcacgcgatttaaagaaaagcgctaaaaccaacaaataatgagtggggagaaacagaaagtcagcccactgaccgaacctgccctcccctcatttcaattttcaatttttaattctcaatttaataagaatgttctccgacgaattagaaaaaatatcctgggaagagacgacaaaagccatctattccaaaacagatgccgacgtacgccgtgcattgggtaaaaaagagcatctggatgtcaacgactttatggcgctgatttcacctgccgccactccttatctggaagtgatggcacgccttagtcagaaatatacgatggaacggttcggtaagactatctccatgttcgtaccactctacctgactaattcatgtaccaactcctgtgtctattgcggtttccacatcagcaatccgatgaagagaacgatactgacagaggaagagattgtcaacgaatacaaagccatcaaacgactggctccttttgaaaatctactgctcgtaaccggtgaaaaccctgccgcagcaggtgttccctacattgcccgggcgctggatttggcaaaaccttatttcagcaacctgcaaattgaagtaatgccccttaaagcagaagaatatcaggaactgactaatcatggtctgaatggagtgatctgttttcaagagacttaccataaagcaaattacaagacatatcatccgagaggcatgaagtctaaattcgaatggcgtgtagacggcttcgaccgtatgggacaggcaggtgtacataagattggcatgggtgtcctgatcggtctggaagaatggcggacagacgtaacgatgatggcttatcatctacgttatttgcaaaagcattactggaaaacgaaatacagcgtaaatttcccacgtatgcgcccgtctgaaaatggcggcttccaaccgaatgtagtcatgaacgaccgggaactggctcaacttacattcgcgatgcgaatcttcgaccacgacgtagacatctcctattccacccgtgaaagtgcagaaatccgaaatcacatggcaacgctcggtgttacaaccatgagtgcggagagtaaaactgaaccgggaggatattacagttatcctcaaaccctggaacaatttcacgtaagtgatgagcgaaaggcggttgaagtggaacgtgacttgaagaaactaggtcgcgaaccagtttggaaagattgggatcagtcttttgattttaaaagataggcagatgcgatacgatagacaaatcatacttcccgaaatcggagaagaaggtcagaagaaactgcaggaagccaaagtgcttattgtaggtgtgggagggctaggctctcccatcgctctctacctagcaggcgccggtgtgggatgtctcggactggtagatgacgatttggtaagcatcactaacctgcaacgacaagttctctattccgaaaaagaattgggcaaaccgaaagctatctgtgcagcggaacggctctccgctctcaacagcgagatcagaatacatccctactctacccggttgacgaaagaaaatgcttatcatatcattcaggaatatgatatagtagtcgacggctgtgataactttgccacccgctacctgattaacgatatctgcattgaacagaaaaagccatacgtatatggtgctatctgcggctttgaaggacaggtttctgtattcaactatggaaaccagaaaaagaactaccgggatctttatcctgatgaagaagaaatgcaacgaatgcctcctccgcccaaaggtgtgatgggagttactcctgctattgtaggaagcgttgaagctacggaagtgctgaaaataatctgtgattttggagatgttttagccggcgaactatggacaatcgacctgcggacatggcaatctaacaaattttcactataaaggttggtttctgacatagttaattagtaactttgctaagcaatccaattttaacaaaagaaatgaaactaattgtagttaccacccctaccttcttcgtcgaagaagataagattattaccgctcttttcgaagaggggctggatgtcctacatcttaggaagccggaaactccggctatgtattcggaacggctattgacacttattccggataaatatcaccgccgtatcgtcacgcatgaacatttctatttgaaagaagaatttaatctgatggggatccacctgaatgcacgtaatcccaaagagccgcatgattattatggtcacatcagctgttcgtgccattcagtggaggaggtaaaaaacagaaagcatttttacgactatgtttttatgagtcctatttatgatagtatctctaaagtgaattactattcaacatatactgccgaagaattgcgtgaagcacaaagagccaaaattatcgattcgaaagtgatggcattgggaggtatcaatgaagataatttgctggagattaaagatttcggtttcggaggagctgtcgtattaggagatctttggaacaaattcgacgcctgtcaggatcagaactatttagccgtaatcgagcactttaaaaagttgaaaaagctatcagattaataaaaagccgatagtaaactgactgtacattcctattgtatatccaataaaggaaatgactttctcaatcataaaataaaaaagccgccgcgaattgtcttccgcaacggctttctgtattttcggtgttttcttatcagaacttatatcccacgataatagagaagttcatgtttttaggattaccaactttttccacatcaaccagaccaaattgaccatccaagcctgcaatgattctaccaaattccaatgcaactcctacaccaagacctgcatcaaaacgcttcaaagcatcatcaccaaaagtgtcgactttacgttctgtgtcattacctaagtcaaactttgttttaccggcaataccacaagcaaaataaggacctgcattcaccaccagattagtattatctgctacattgaaacgtgcagcagccattactggcaattccaaatacattgcattaatgctattgccatctttctttgcacctttactagttaagaataatgaaggttgcagtgaccatgtatcagtaaaagcatattcaaaacctccaccaagtttgaatccaacctttgcattcagatcaagatcaccggtgtaattactaaagttcatacctactttggcattccaacctgtaatttgagagaaacctgccactgaaatcagtgcaaataaaacaaacaaaacactcttcttcataattttaaagttttaaattaatactaaaggtttttattgacctcattgtttaacaatacaaatgtataattgtaatttgtattaaacaactttttcgttaacaagtgcgcaatttatagagattatacataaaaaaagggaattccctatttttgagaactccctttcctaatttgttgatttgttttcttcttattagaatgcgtaatggaaaccaattgaaagatcttcactagtaagttcaagaccaaaagaatctccaagcgtatttatatttctacgatatcccaggaaaccatacttggcaatgaaagagaagtgatcgttcaatttaacagcaatccccggtctaagtcccacttgtccggctttagtagtgtctccgtctttaaccttcacgaagccgagagcagcagttccgtccagaaacaggcgaaccgcaccggtttcacagtaagaccaacgaatgtatggagcaacaattactgaattttttgttagtccaccattataattatgtgaataatccaattcagcacccaatgcccatgtttcattaaagttgtatccaacttccggagcaactttaaaagaagtagtgttgcctgtgctgttacgccaaacgttcaaagatccgcctacgtaaacgtcttgtgcttttacagcgatagttgctaacattacaactaccaataataaaccctttttcattttctttgtttttttaaatcctcaaatccgcaactacgcgcctaatatgatacagaagcgaaaagaatctgcatcgttagtaaaaagggggcacagtgcatcgaatgtcaccataaagacatataaatgccccttaccccaccatgcgacttgaggcaatacgcaaaatcacgactataagttgtcggtgttatccaaagtcattctggaacacattggcataagcattgttgcatgaatagatattcagcacatacttccttgatgtcctgacccatttggctggcacagagatgaacttaaagacaaacgtcttgatgcggcttgttgctttgagtccgaacctcttcacgtcaagcctcgccatgatgaatttatagaagttgcgtatgagtgccataagcagaagaaacaccgtgttttctcccataaaggattttggaagcctgttccagccgaatccgttattcatatcatcgaagatgcgttccttccctccacggaggttatagaattcgacaatctctttctcggaagactcgtagtcatttgtaaggatgcagcggtaggtgtattctccttcccacaggtcgagttcgccgtctatccgcttctgtctttgaatcacaagacggtatgccttccctttccatttctcgatgagaatggaggccagctcaaactcaatgccgcccaattccactttcttccaacctctgagggcaaagatgtcattgtagagcgaactgcatcggttagcacggatatagaaggtcttgcagtgtttagcaatctcttccactatctcttcagaacacgagccgcaatcagctctgaaacggttgataataagcttgttttgttcaaacctttcaaagaacctcttcagcgtgtccttctggtggaaacggacatttgtgttgccgtcgctgttctcaatgccgacaatcaagttgccaataaccgccacgccagggcgataaccaaggaacttcttgtatgtaggcttcgcatcaaacttctcagcctctatgaactggtggtcgaagtcaacgtcatacccctcgccctctttcagctgccctgtggacaataggcaattgaggagcagtgtattcagcttgtctgccgtgttgaagtcgtaggtcttgccagtgtcggatgtgtaggaaatgttatcctgggtcagttcctttatggctctaagaatcgtgtcggcactgcatgtgcgaagtgtcggatgaagcgaaaggtggtacatcagatgagtggtgacatcctcgatgcatgagccgccacaaaaataaacgctcataagcgaacggatgatttcgctgtattgataaccatacagcctgcatctcataccgagggttgagtcgattacagatgagagtctggagtcaaattgctccattattgaaaatattcctccaaaaggagtgagtttctcggatttaattgctacctttgccatgtctgtcgggtttgatacatattttgatttgcaacactaagataggtgaaaaatctgacatggcaaattcctgagcaactttttgttgctcaggtacttaaaaagttatatttgtaatagtgttgcggaattaaggtaaattaaacgttagaccccaattcggtcgatttctggggtgcaaatgtaaagctgtttttatgattaaacaaacatttagttagttttttataataaataccaaataaatattgggtggtaaacgaacatcaatacccaacaggcataaaataaaatagactgcaaatactttcacaagtatttacagcctatttatcagatagttaagtacctaaccagcgtatttgactatccttctatcgctgcctgcgccgccgccagtctggcaatcggcactctaaatggagaacaactaacgtagttcagacctacccggtgacagaacttcacagaagaaggctcaccaccatgttcaccacagataccacatttcaaatccggacggatagcacggcctttttctgtcgccatacgtaccagctgtcccacaccattctggtcgagaacctggaacgggtctactttcaaaatcttcttttccagataaacaggaaggaaagaagctatatcatcacgagaataaccgaaggtcatctgcgtcaagtcatttgtaccgaatgagaagaactcggcagaagaagcaatacggtcggcagtcaaagcagcacgcgggatctcgatcattgtacctactttgaaatcaatattatctcctacttcctcaaacaatttcttagcttccgagcgaatcacattttcctgctccttgaattcatacaagataccggttaacggaaccatgatttccggatgagtttccactccttctttcttcagttccaatgcagcacccaaaattgcacgtgtctgcatttgagtaatttcaggataagtatttcctaaacggcaaccacggtgacccaacatcgggttatgttcacacagtgattctacacgttgctggatatattgcaggcttacacccatcgtatccgccatttcctgctgtcccttcaaatcgtgaggaacgaactcatgcaaaggaggatcgagcaaacgaacggtcaccgggcaaccagccattgctttaaagatacccttgaagtcttcttgttgatatggaagaatcttagccaatgctttccgacgtccttctgcattttccgccaggatcatttcacgcattgctttgatcttttcgccttcgaagaacatgtgttctgtacggcaaaggccgatacctactgcaccgaagttacgtgcaacttccgcatcatgaggagtatccgcattggtacgtacctgcaaacgagtatatttatcagccagtgtcatcaattcggcaaagtcgccggaaagctctgcagccttcgtttctaccttaccattatatactacacctgtacttccgttcaaagagatatagtcaccttctttcagtagtacaccgtcaatctctaccgtacggtttttataatcaatgttcaatgcacctgcacccgatacgcagcatttacccataccacgagccacaacagccgcgtgagaagtcataccgccacgagccgtaagaataccttcggcgactgccataccggccaagtcttccggagaagtttcgatacgcaccatcaccacacgtttaccggcagcatgccattcggcagcgtcatcagcgaagaatacgatctgaccggttgcagcacccggagaagccggaagaccacgggtcaacactttggctttcttcaaagcatccttatcgaatacagggtgaagcaattcatcaagcttattcggttccacgcgcatcaaagcggtcttttcgtcaatcataccctgacggagcaagtccatagcaatctttaccatggcagcacctgtacgcttaccgttacgtgtctggaggaaccagagtttaccttcctgtacggtgaactccatgtcctgcatatctttataatgattttccagtttagtctggagagcatccagttctttatagatttccggcattgcttcttccattgaagggaatttcgcagcacgaacatcttcggtaacgccagccaatacagcccaacgttgagaaccaatcttagtgatctgctgtggagtacggatacctgccactacatcttcaccttgtgcgttaatcaggtattcaccgttgaaaaggtcttcgcctgtaccggcatctcgtgagaaacaaacacctgtagccgatgtatcacccatattaccgaacaccatagcctgtacattgacagctgtaccccattcatcaggtataccttccatcttacggtaaaggatagcgcgttcattcatccatgaatcaaatacagcacagatagctccccaaagttgttcgtatgcacaagtcgggaaatcttttccggtctgttcttttacggcagccttgaatttctttacgagttcctgcaagtcttccactttcaactcgttatccagttctacccctttcgcttttttcacctcttcgatgattgcttcgaacgggtcgatatcttctttattggtaggcttcatgcccaacacaacgtcaccgtacatctgtacgaaacgacggtaagagtcccatgcaaaacgtgcattacccgtcttacggataataccttccaccacttcatcattcaatccaaggttcaggatcgtatccatcatacccggcatagatgcgcgtgcaccggaacgtacagataccaacaaaggattttcaacgtcaccaaatttagatttcatcaacgcttccacatgagcgatcgcttttacaacttcatctttcagcaactcaaccactttatcacgtcctaacgtattgtattccgtacaaacatctgtagttattgtaaatccgggagggacaggaattccaattaaattcatttcagcaaggttggctcccttaccaccgagcaaattcttcatgtcagcctttccttctgcctgaccattaccaaaggtataaactctttttttatccataatattgtgtttaaagttacattatgacttttttctgttcgcaaatctaaggatatttcgcaaacttgaaaactttttgcgaaaaaactttctatcaaaatgcaatttcgacattacaatccggaatatttctgtatacccgaattttttccaaaaaaaatacctacttttgcaaagtaattattagactggtgtaaaagtggcaagaaagaaaaaagagcttcccttattggagaaggtaacaatcatggatgtggctgccgaaggaaaagccatagcaaaagtaaacgacctggtgatttttgttccttatgtagtgccgggtgatgttgtagacctgcaaatcaagcgtaaaaagaataaatatgccgaagctgaagcggtgaagtttcacgagctgtcgcccaatcgcgctgttcctttctgccaacattatggcgtatgcggtggctgcaagtggcaagtgctcccctattcagagcagatcagatataagcaaaagcaagtggaagataatttgagacgtatcggaaagatcgaacttcctgagatttctccgattctcggttctgacaaaacggagttttacagaaacaaactggaattcaccttttcaaataagcgctggttgacaaacgaggaagttcgtcaggacgtgaaatacgatcagatgaatgcggtaggtttccacattccgggagcgttcgacaaagtactggctattgagaaatgctggttgcaggataatatatccaaccacatccggaacgcagtacgtgactacgcttacgaacacgattattctttcatcaatctgcgtacacaggaaggtatgctacggaatatgattatacgcacatcttccacaggggaactgatggtaatcgtcatttgcaagattacagaagatcacgaaatgaaactgttcaagcaattactccaattcgtagcggactctttccccgaaatcacttctcttctatacattattaataataagtgcaacgataccatcaacgatttggacgttcacgtatttaaagggaaagaccacatctttgaagaaatggaaggactacgtttcaaggtcggcccgaaatcattctatcagactaactcggaacaggcttataatttatataagatagcccgtaactttgccggattaacaggaaacgaactggtatatgacctttatacaggaacaggaacaattgccaatttcgtttcacgccaagcccgtcaggtgatcggtatcgaatacgtgccggaagctattgaagacgcaaaggtgaatgcagagatcaatgatatcaagaacgcaattttttatgccggtgatatgaaagatatgctgacgcaggatttcatcaatcagcatgggcgccccgacgtaatcatcacagaccctccccgtgccggtatgcaccaggatgtgattgatgtcattttgtttgcggaaccgaaacgaattgtatatgtaagttgtaatcctgctactcaagcgcgggatctgcaattactgaatgaaaagtataaggtgaaggctgttcagcccgtagatatgttccctcacactcatcacgtagaaaatgtggtgttgctgaaacttcgataaagagttcaccacagattacacagattagcacagattataataatcagtaataaaaatctgtgttaatctgtgtaatctgtggtgaaaaataaattctcaaaagaaaaaagaaatgaaaaaaagacctagaagaactcctgctgaaaaagcacgtgctcaatataccaattatgcagtcaaagagcccatggaattaatggagttcctggctgccaagatgccggatgcaagtcgcacgaaattaaaatcgttgttaagcaagcgggtcgtgtttgttgataatgtgataaccacgcaattcaactttccccttgaagcaggcatgaaagtgaaaattagcaagcaaaagggaaagaaagaatttaataacagattgctgaagattgtatatgaagacgcctatatcattgtcgtcgaaaagatgcaaggacttctatccgtcaatacggagcgtcagaaagagcgcactgcctacacgatactgaatgaatatgtgcaacgctccggacgtcaattccgtgtgtttatcgttcaccgcttagatagagatacttccggtctgatgatgtttgccaaagatgaaaaaacgcagcggacgctacgcgacaactggcatgagatagtgaccgaccgccgatatgtagctgtagtggaaggtagtatggaaaaagattatgatacagtcgtttcctggctgactgataaaacgctttacgtaagttccagtgaatatgatgacggtggatcaaaatctattacccactataagacaatcaaacgcgctaacggatattctctgttggaactcgatttggaaactggccgaaagaatcagattcgtgtacacatgcaggatttaggccatcctattatcggcgacggaagatatggaagagaagattctcccaaccctatcggacgattggcactccatgccttcaaactttgtttctatcatccggtaacgggagatttaatggagttcgagacgccttatccggcggaatttaagaagttgtttttgaaaaaataaattcctatattcaaaaaacaaagccagaatcatgattgactctggctttatttttaatctttatcactgttttattgacgacgcatatagaatggttgtccatctattctatccctaaaatcccgccaattattataccatgttccactaaaagttctatcggtagcttccgcaccccaaatataggcataagtgccatcaccataaaaatataattccattgaattatatcctccatcaatccatctccactcaaaaaccaaataattcggatcaccggcagaaccaattgttccttgatttctcgcgttaaaagtcataagcgtacctcttccccaggtatatgccccgaaatcaatctcttcattcgtataccactcaccaggcagattaaattctgtctcgtcttcactttcacacgaagtaaagccaaccaataaagtcagcatcatcaagatacccgcatatctctttatcatttccataattctctagtttattgcgtttattaatacaaaattagcgttttttatttactatacattacaagccacaagttttttgtacctttgcaaagataatattaaaatttccacatgaaacttctttggcttgatttaaatagttcgtacgctcattcttcgttggcattacctgccttacatgcccaaatagcaaataatacagacattgaatggtgtaccgtctccgctacgatcaatgaaaacactggcagtgtcgtcaatcaaatctaccgccatcaaccggatatcattgcagctaccaattggctattcaatcatgagcaactcctgcacattgtttcacgcgcaaaagcattactacctcactgctgtgttatactcggaggtcccgaatttttaggagataatgaagctttcttatataagaacaaatttgtaagcggagtgtttcgcggagaaggcgaagaagtatttccattatggttaaaagtgtggaatcagccaagaaaggaatggaaatcaatcacaggactttgttacctgaatgaatcaggagaatatcaggacaacggacttgcccgtgtcatgaacttttctgaattggttcctcccgaaaaaagccgtttcttcaattggagcaaaccatttgtgcagttagaaactacccggggatgttttaacacctgtgctttttgtgtcagtggaggtgaaaagccggttcgtaccttatctctcgaagcaatcaaagaacgtctcgacgtgatacacgaacacggaatcaaaaacgtgcgagtactggatcgtactttcaattacaataataaacgggcaaaagagctattaaatttattccgtgaatacccggacatctgtttccatctggaaattcatccggcactactttccgatgaactcaaacaggaattagccactctgcctaaaggtctgctgcacctggaagccggtatccaaagccttcgggaaaacgtgcttgaacaaagtcgaagaataggaaaactctccaatgctttggccggactccattatctatgttcacttgaaaacatggaaactcatgccgacttgatagccggactcccactctaccatctatcagagattttcgacgacgtccgtaccttaaccgagtatggcgcaggagaaatccaactggaatctctgaaattacttccgggcaccgaaatgcgaagaagagcggatgaattaggtatacagtattctccacttcctccatacgaagtacttcaaacccatgaaatcacagtagatgagttacaaacagcccattatctgtcacgcctgttagacggtttctataacactcctacctggcgaaatatcacccgtatactaattttggagaacccccattttatacatgacctactcgaccatctggtccggacagatgtcatcgacactcctcttagcttggaaagaagaggattaatcctttatgatttctgcaagaatcattatcccgactacctgacacaagtcagtattgcatggatagaagcaggtatgtcattaaaaaaagctccggcagaaaaagtaagaaccaaaagacagttacctcctgaaagttgggaagtagtatacggtgcataccgtgaaaatctacgactatgtttcctccctgtcgatgaagaaggacatggctactggtttggctttgaatcggaaattcagaagatacaacccgttttcaaagctagaaaactatcataaacaaaagaaaagtattcccatattatgtgaaataattactattcactaatcgttcaaagcagcatatcctgtttttcaccgtccatacaataaactttactagcacagtgtatggacattcggaaatatcaattgaatattctttgtttattattgttccccttatccgcaacagggcaagaatggagcaaacaggactcattgagacttcagcaaatgttggaatccgatcaggaaatcaagataaacagaaagcttatcgaaaaagtagagcaaaaaatgtactctcgaaaaccatttgtagattttgatcccacactacccactttaaaatcttccacaatcttttcgaaaccttctattcacacatacaagatgttccaaaagccaggttccacctttttacccacttattcctggctaagaataaacaagaatcttattctgcatagtaaaagtgactttgcagaaaattccaatcatttccatatccaaagccaaatggaatataaattatcctccagatggtctctcgatatatatggttcacaaaacctcgatacccgaagataccgagggctcccctccgaagtggaaccaaccaaattgggaagtaatgtcgttttcaaaataaacaaaaactggaaaatcaaaacagggatgcaataccaatataatgctatacgaaaaagatgggaatggatacctcaagttagcgtttcatacgaatggtaaatcctattgataattgaggatcgaaaagttttagaaagcaagaaagcatattttccatttattctcgtacctttgtcatacgattaaatatgctatcataatgaagaactttatcaagggattccggtttaccccctctaattatccggcagaagtagaagcaaaaatacagaaatacagaaaacaaggttacaaacttccaccgcgtaaagtactccgtactcccgaacaactggaaggcatccgggaaagtgcaaaaatcaatacagcactgctggattacatttcagaaaatatccgggaaggaatgtccaccgaagagattgatgtattggtatatgatttcaccaccagccacggcgctatccctgccccactcaactacgaaggatttcccaaaagcgtctgcacaagcattaacgacgtggtttgtcacggtattcccaacaaaaatgagattctaaaaagcggagacattatcaatgtggacgtttctaccatttataaaggatatttctccgatgcatcccgtatgtttatgattggcgatgtcaatcctgacatgcaaagattagtacaagtcaccaaagagtgtatggaaataggtattgccgctgcacaaccctggaaacaactgggtgatgtaggcgccgccatccaggaacatgcagaaaagaacgggttcagcgtagttcgtgatctctgcggacatggcgtagggatgcaattccatgaggaaccggacgtagagcatttcggccgacggggtacgggcatgatgatcgtaccgggaatgacctttaccatcgaacccatgattaacatgggaacctacgaagtctttatagatgatgccgacggatggactgtctgcaccgacgacggactcccctccgcccaatgggaaaacatgattctgattactgaaaccggaaacgaaattcttacttattaatggaattaattttacttatcgttgttgctgcattagtgatagtcttactaatactgtcacttacaaaaggtaataatcaaacgcaagcggaacaactgcaaacagctttgcgccaacaaatgcaggagaatcgcgaagaactgaatcgtagcatccgggaactccgcttggagatgactcaaacgctgaatcagaatatgcagcaattgcaagatgcattgcacaaaaatatgttgactaacggagagctgcagcgtcagaaattcgatatgatggcccgtcaacaggaatcattgattaaatcgaccgaaaagaggttggatgacatgaggacaatggtggaagaaaaattgcaaaagacattgaacgaacgcattggccaatcatttgaaattgtccgctcacaacttgagaatgtgcagaaaggactaggcgaaatgaaatctctggctcaagacgtaggcggattaaagaaggtattgagcaatgtaaaaatgcgtggtacattcggcgaagttcagttaggagcattattagagcagatgatgagtccggaacaatacgacgctaatgtaaaaaccaagaaaagcggaaccgaattcgttgagttcgcaatcaaacttccgggaaaggatgatgcgaacagcaccgtctacctgcctatcgacgctaaatttcccaaagatgtgtacgaacaatattatgatgcttttgaagcaggagatactgcattgatagaatcgtccggcaagcaattggaaacaaccatcaaaaaaatggcgaaagacattcacgacaaatatgtagatcctccttttaccacagacttcgccattatgtttctgccttttgaaagcatttatgccgaagtaatccgaagaacaagcctggtagaaactctgcaaaaagattacaaaatagttgtcacaggacctactacactaggggctatcctaaatagcctgcaaatgggattccgcacgttagctattcaaaagcgaacgggagaggtttggacggtattaggagctgtaaaaacagaattcagcaaattcggaggactactcgaaaaagtacagaaaaaccttcaaaatgccggcgaccaactagaagaagtaatgggtaagcggactcgcgctatcgaacgaaaactccgccaagttgaacaattgccacatgaagaaagcatgaaaattcttccgatagatgatggagacgatgaatcgacagattaaagcgaaatccgaagtacgacatatcccagtaagccggaaagtacggttccggtcaatacaccaaatttggcctgattcaataatacaggatagtctaccccaaaagaaagattagcgataaagagtgatacagtaaagccaatacctcccaacaatgcaactccggaaagattcttccaggtcatccctaaaggcatgggagtcaatcttatttttatagccagccaggtaaagaaatatattccaataaattttcccagtaacagaccggcagcaacagcaatactgacagctcccactaattcgcctcccccactaaacacaacgccggcattgacaaatgcaaaaagaggaagaatcaaataattgactgttccatgcaaattatcttctaatgactgcaacggactaattacacggtcggaagccgattcgacctctttcaacttggctatttgctcattagtcagcacaatgctttcagattgcattgccggaaaatcggcaatggtatgacgaattttttcgatgtacttccctacattcagacgaggtttagcgggaataacaaaagcaagaataactcccgaaatagtgctatgaataccggattgcaaaaataaataccagataatcaccccaatcaccaagaaaaataccttatttgtcgttccatactttcctataaaataaagtaaaatataaaagagtatagctaccaaaagataaccataggcaacatgtgaactataaaaaagagcgatcaccaaaattcccccgatatcatcgactaccgcaaaagcagtcaaaaaaatcttcaaactcaacggcacacggctacctaataagctcaacacccccaatgaaaaagcaatatccgtagccataggaatggcgagtccatgtccgccttcactacccggaacacaaataagcgaatagatcatcacaggcaacaacatcccaccacaagcggcaatgaaaggcaacaccgccttacggaaagaggaaagctcacctaccaatagctcacgtttgatttccagtccaaccaataaaaagaaaatcgtcatcaaaccatcattgataaactcaatcattcgcagattttccccaccatgcgaaagcaaattaaaatttcctatctgtaaatgaagttcatgcgacaaaaattcctgatataccggagccacagaagagttcgcaataatggctgccgagatagcagccaggaataaaagaatactcgccgtgatattcatagacgagaagttccgcatagtccgcaaaatagtcataacgaaatgtttttataatattagttttgcaatatacagaattttctaattagtataactccttaaagcaagatttttgacccaaagtacaaaaattcctgtcaaaatcagattcagtaccaaggtaagaacagaaattaccaatgccggcccacccaagttataccctaacgctatgaaaataattccggctcctacctcaccacgggtaaacataccgatagaaagagccagtcgctcgcttaatttccggtcacggtaaaagaacatcgggcaaagttttcctatattcgacaataaagagacaatcactacatgaaacataatcaccccccacgacatcatctcctgcgaaccggtgacggaataagcacctgcatgagtctccgcaaagttcacaccaataaaatgcggcatactcatccccaccaggaacatgaagaaaaatgaaattccggtagaaacctttcgttccacgggcgtgtcatgttccttatgtttcataatcatacccagcacaaatgcaggcagcaggacttcaatatgaatacttccctcctccccatacaattccttactaccgagataaagaatttgagtagccaaaaatatgattattgaataaaagaggatagccttccaatcctgacgccaatcgtatttattcagcctttgccagccgatcgataataacaggaacacaatcaccaccacaataatcaactgccagcgcagcccgatcatcataatctgaagaggaatcatcaaaagaatcgtatccaaatcatcgaaaatagccaacacctgtatcttcttataaatccaactggactttagcccgatagccgccaacatcgtaaacaaaataccggctgatgtcggtgcggcaaaacggctcaacagcaaattctccttccaggcttcccaactgttccaaaaatcgggtggaagcaatacaaacacataataaatggcaatcataaaccacggcaaagcagccgtagccatggcaataaaataatcctgggcgtaacttttccaccgtgtcttatcaagaacaaattcacggcctacattaatcattataaaactaaggcatacatagagcaatacattcgatatggatttaacagctccatagccatcccctgccatcatcggcaggaattgcgaaacgacgagccccagcatcaggaagcccgaaaaagacagaacttttctcatatttatagttgtttgttcctaaaaagtgattgccaaggaaagctctgcagacagaaggcaatcacctggtgtattaaaaactaaccgcaagtcaatttgttcagaacatatctctgaaaaattgcttgcggcagtgttttttaatccagcttcagtacggcgaggaaggctttctgcggcacttccacgttaccgatttgtttcattcgttttttacctcttttctgtttttcaagcagtttacgtttacggctcacgtcgccaccataacacttcgcggtcacatccttacgaactgccttaatggtttcgcgagaaataatcttcgctccgatagctgcctgaatggcaatatcaaactgttgacgcggaataagttccttcaacttctcacacatccggcgtcccatatcgtaagcattgtcaatatgcgtcaaagtggaaagcgcatccacaggctcaccgttcaagaggatatccaacttcaccagtttagaagtacggaaaccattcggatgataatcaaacgaagcataccctttggaaatactcttcaacttatcataaaagtcaatcacaatttctcccaaaggcatattataatagatttccacccggttaccggagatatattcctgtttaatcaattcaccacgtttacccagacaaagcgtcatgataggaccgatataatcggtagtagtaataatagatgctttgatatacggctcttcaatatggtcaatcatggtcgggtcaggcataccaccagggttatgcacttccttcatattaccttgcttatcatatatatggtaagaaacgttcggcaccgtagtaatcacattcatatcaaactcacggtccaagcgctcctgcacaatctccatgtggagcaatccgagaaaaccacaacggaagccaaaacccaaagccaacgaagattccggctggaaagtcaaagacgcgtcattcaactgcaacttctccaaagacgcacggagatcttcaaaatcctccgcttcaatcggataaactccggcaaataccatcggcttcacttcctcaaaaccggcaatagccttttcacacggacgggcaatatgcgtaatggtatctcccactttcacctctttggaagtcttgataccggaaataatatatcctacatctcccgtacgaagttcgttacgaggcaccatatccattttcaacacccctacttcatcggcgtcatactcttttcccgtattgaagaacttcaccttgtctcccttgcgaatcataccattttcgatcttgaaataggctataattccgcggaaagaattaaatacagagtcgaaaatcaaagcctgcaacggagcctcttcatctccttccggatgaggaatccgctcaatcacagccgccagtatctcttccactcccatccccgttttgccggacgcacggattacttcctcccgtttgcagcccaacaattcaacgatctcatcttccacttcttcgggattggcgctcgccatgtcacatttattaatcaccggaataatctcaaggtcatgctcaatagccatatacagatttgaaatcgtctgcgcctgcactccctgggaagcatcgacaatcagcaacgcaccttcacacgcagcaatagaacgcgatacctcatacgaaaagtccacatgtcctggggtgtcaatcaagttaaggatatacttttcaccctgataagtatattccatctggatagcatggctcttgatagtgatccctctttccttctccagatccatattatcaagcatctgcccggaagtaacctgaatggtatgtgtaaactccaacaaacggtcagccaaagtcgacttaccgtggtcaatatgagcaataatgcaaaagttgcgtatattcttcattctgaattcttattattttatctttttggtgtgcaaagatacgtaaatggcggaataaaaaaaaatgcgttgataacattatgattatgtaccaacgcatttttttattgcttaagtgagttactcgcttagatcaatttgatgaagagttcaccttcaacttcttccacagagactttgtcttctctcaataaccaaccaaggccgagaaacagatctttgtcaaccaatttagttgcttttttaagctgcttggcagtcattccttctgtttcgttcagtgcattccagatagtacctgcaattacaccagctttttctttcaacatttgctttgcaattttagttagacatgcttaaaatctttccagccaaaagactttcagattttatttcggaggcaaagatagttatttttatgttatataacactttattgagcacttttttaccgtttttgtaataaaaaagcattttaggagctcattttggatgcttttcgagatattccgaccaaattcttgccgcttcttcaaccatttttgcacagggacgcttgctataatattgagcagtacgctcttccggaatagtggagaccggctcttttttctttaatcccaacaattcgccacaaatcagcgagccgttacgcttcttaaattcagccgccagttcttgcactaccgcataattggcagtttttccttcccggtcagttgcttccgtagcaccggtttccaagcctgccaccagaaacatgccgcaggcagctccacacgtttcacgcattcgtccgatgcccccgccaaaagaagcactcatacgcaatgcctgttcctgtgtaaatccatacatgtccgcaaaagccgctaccaccgactgtgagcagttatatccactcttaaaaagctccactgctttctgtattctatcttccataaactattttgcatttttattttgtacaaaagtataaaaaagtatctttgtatcagatagggcgtaaagattaaaatcaaaaaaaagaaaatatgaacaaaactatttcatataaagaatcgacagccattgccatccaagctatgatgagcacagccagaaaggatgaatatgccgataggaaaagaaaaagtaatttccctcaaaacagaaagaaacgtgatgtcactcttaaggacatacgtgaatggaacaaaagaaggaattataaagaagacacaggaatcacaatcaacgcgatgatggaatcagccgtcaaagatccgtatgtggatctgaatccaccatccaaattttaaaaagctaaaatatatatggctacaacatttgacatccaactacctcattattcgcgcggatttcatctaatcacgcgcgatattgtctcacagctacccccacttcctgaaagcggcctgctggtagtctttatcaaacacacttctgccggactgactatcaacgaaaatgcagacccggacgtacggcatgactttcagacgttttttaataaacttgtccccgacggtgctccctacttcatccatacccttgaaggccctgacgatatgagtgcccatataaaagcctccctgataggaagctcggtcaccatccccatcaaaaaccaccgtttgaacttaggtacatggcaaggcgtctacctcggcgagtttcgcgacggaggagacacccgtaaattgagtattaccattctataatatttccagagccatcggacaatggtcggaatgtacggcctcattcaggatatacgcccgtttcaacagcgggcgtaccggctcactgaccatacaataatcaattctccagcctttattcttggcacgcgaattaaaacgatagctccaccaggtatattcctgtttctccggacaaagcgtacgaaaagagtccacatatcccgcagacaggaaacgcgtcatccattcccgttcttcaggaaggaaaccgctgttggtcgcgttccggacagggtcatgaatatcaatcggctcgtgacagatattataatcgccgcaaagaatcaagttgggacgagacttctgcaactccatcacatatttctggaaatcttccaaccagaccattttaaaggcctggcgttcatctccgctcgttcccgaaggatggtaaacgctgactaccgacaagtctccgaagtccgcacggatgaaacgtccttcattatcgtatgcttccattcccatcccatattccacatggtccggttcccgcttggtaagtatagccactccactgtatcccttcttctgcgccgagtacaaataagacttgtagcccaatgcttcaaacacttctcccggatattggtccggttgcagtttcgtctcttgcagacaaagaatatcaggattctcctgtgccagccattccggtaaccctttagatacggctgcacgtagtccgttcacattataagtaataattttcatcattctatatttataagttcatgttcattttatgaaaacaaaagcataatgttcagtaccgaaacgataatagcaatcgagtacaacacgaacgtactccaacgactattgacataatcgcccatcacctttcgggaagacgtcagtcccacctgtaagaacacggtgaaaggcaattgaatactaagtaccatctgcgaaataatcaatcctttaaaaggatctccaataaagaaaatcagcaataaggcaattcccaaagacaagagaactcccacctgcgagtgactgtccttgatatgataagactcgccgaaaatacctgcaaaaatagaacctgccgccattccgctcgtaatagttgacgaaatgcccgccatcagcaatgccaatgcaaatacaattgccgcattacttcccaataaaggttcgagcaaagacttagcctgttgcagttcctctacctgaataccgcttttaaagaaagtggcggccgccagcagaatcatggcactgttaatcgcccaaccgacaatcattgagaaaagagtgtcaaacaactcatatttcaataccttcttaatagaagcatcatctttcttattgtactcgtgactctgtatcacctccgaatgaaggaacagattatgaggcatcactaccgctcccaacacactcatgataatcagcatactacctttcgggaaagaaggagtcacccaccccgccgttgcagccggccagtctatttccaccagaaacaactcataaataaatgaaagcccgataacagaaacgaacgcaatgatggaacgttctatctttttatacgaattagtgaaaagcatgatggagacaaaaagcgtagtcaatacagctccccatataataggaatatccaataacatttccaacgcgatggcacctcccagaatttccgccagggaagtagagatcgacgccagtactgctgtgccaagaataggtcgtgacacccatttaggggtgtacttagtggccgcctccgaaaggcaaagtccggtaacgattcccaagtgagcaacgttgtgctgaaggacaatcagcatgatagtagacaaggtaaccacccaaagcaaggaatagccgaattcggaaccggcggcgaaattagaagcccagtttcccggatcaataaatcctacagtaaccagtagccccggaccaatatatttaaaaacatccagtccacctagatagcgtttatgatctttgcgtcttaagtcttgaaaaatattcttcatttttgcataatagtttatccagtacaaatatacttataaataacgagtgagaatcaattttagttcaaaataccgaccaataagtagatgacctatgaacacagatgatacactaattatgagaacattattataaaaggattgagtaaggactactcgagaaaaggaaataaggactttctgcaaaaaaaatgacctccgacaaaccaattgccagaggtcacaaatcaatatataatttacataaatgaagatcaatcaatatcccatctcatgcaatgcatgacataattgatcgggacaagatgtcggcctgccaccacaacgcactccttcaagttttgcgatcacttcctccaccttcattcctctcacaaggcgggaaataccttgaaggttaccattacatcctccccagaaagcaacttccttcaccactccatcttccacattcagttcgatattcgtgctgcaagttccctgggtcttataaacatattccataaccttactttactcttccccttcttccggttgcatgttggtatagacagtctgcacgtcatcaaattcttccagacgttcgatcatcttatccaatgtttcgcgttgttccggagttacctctttcaagtcgttcgggatataagtgaagtctccaccgacatcttcaaagccacattcttccaaatgcttctgaatagcggcgtagctcttaggattaccatagatagtaattgttccctcttcatcatcttcttcatattcatcttccacgtcatagtcgatcagatcgagaatcagttcttccatatccaatccgtctttcttcttgaaagtgaacacacatttgtggtcgaaaaggaacgcaagagaacccattgtacccagattgccaccgaacttattgaataccgaacgaacgtcagctaccgtacgagttgtgttgtctgtcaatgtgtctacaaacacagcaataccgtgagggccgtatccttcataagtcatgctcttgtagtcgctctggtctttacccattgcgtttttgatagcacgttcaatgttatccttcggcatgttttcacgcttacaagtagcgatcaccgaacgcagcgtcgggttgttttctggttccggaccgcctgcctttacagcgatagcgatttgtttacccagtcttgtaaaagttttagccatgtggccccatcttttcagtttagcggcctttctatattcaaatgctcttcccattggtttatatttttaataatgacaattttaagtttatctaagtttggcacccagtttatcttccaggttcttcaccagtttcgacatgatcttatcaatcatcttatcattcaaagtctggttttcatcctgaagcaggaagctcaccgcatacgacttcttacccgcttcgaggttcttaccttcatatacatcgaagagttccacttctttcaacagcttcttctctgtttcgtatgcaatcttttcgatttcggcaaattgtatattcttatcaagcaacaatgccaagtcgcgtttcacagcagggaatttggatatttccttgtagctgatcttcacagaacggatggctttcatcaattccttccagttcaagtcggcgtaatatacttcattgtcgatatcaaatgctttcaacaacttcttagttacaataccgaaagaagcaagacgttttccgcccttcgtgttgacagagagtgcggcagcaaaaacatcgtctgtcagattaccgacaaccagattgtgcaaatccagtcccagacgctttaatatattttctacgtacgccttcaattcatacaccgaactgttctcatccgcatgcgcccatgaattggaaaccttcttaccggttacccacaagcccaggtgataatcttccgaataaggagccagtaccttctcttcgttcttcttgtcagcattgaaataataacagttaccgaattcgaagaatttcaaatcagcgttcttacgattggcgttatgagcaatgctttccagtccgccgaacagcaaggtctgacgcatagcgttcaaatcagcactcaacggattgagcaacatcaccaggtgattggacggataagcctccaacccatcataataagcagcacgagtcagtgagttgttcagaatttcattgaatccacaacccaccagttgttctgcaatcagactctgcaatttattcgacttgtcgtgttcaccctttgtagtcagactggagttcagcgtagtcggaatttccacattattatatccatagatgcgaagaatatcttcaatcacatcgcaatcacgctgcacgtctacacgataaggaggaacagccaatgtcagtccttctgccgtttcattggtaatcttcatttccaagctagtcacaatgctcttgattgtctctaccgggatcactttacctaccaaagaatgtactttttcgtaagcaagatcgacgataaaatcctgtgcaggagtagtgaatacatcttttatttcagaagaaatcgtaccaccagccagttctttcaccatcaaagcagccagtttcaagcaataaatcacaccgttcggatcgataccacgttcgaaacggaaagaagcatccgtattcaagccatgacgacgagccgtcttacgcacccatgtaggatggaaataagcactttcgatgaatacgtctgtcgtagcttccgtagagccggagtccagtccgccgaatacgccggcaatacacatggcctcttccttgttgcaaatcatcaggtcgcgttcgttcaacttacgctccacttcatccaacgtaacgaacggagtaccttcgggcattgtcttcacaatcacttcattgcctttaatctttccggcatcgaagcaatgcaacggctgaccgaaagcatgaacgatatagttcgtaatatccactacattattaataggacgcacaccgatcaggcgcaatttgttttgcagccattccggactctccttcaccgttacacctttcacggtaacaccggcataatgcggacaagcttcgctgttttcaaccttcacttcgatattcaagtcatggttttccactttaaagccatccactgacgggcgttgtaaagttgcctgacgaccgttctgaatcagataagcatacaggtcacgagctaccccatagtgagagcaggcatccgcacggttaggcgtgatatccacttccagtacataatcgctcttgatattataataatccttggcaagcgtacccggaacagcattttccggcaatacgataatacctgcatgatccgtaccgataccgatttcgtcttcggcacaaatcataccagtagattccaccccacggatttttgatttcttgatggtaaaacattcgtcaccatcataaagttttgtacctaaagtagctaccaccactttctgtccggcagccacattcggggcaccacaaacaatctgtaccggttcaccgtctcccagattgacagtagtaatatgcaaatggtcagaattaggatgttccgtgcaggtcagcacttcaccgatcaccagtccttccaaaccacctttaatggtttgcacttcttctacaccacctgtttccaagccaatagacgtcaacgcagcagccgtttcatcgggcgtcaggtcgaaattgacatactctttcagccagttataagagatattcatatatttaattttttattgtttctcaaaaagatttgcaaagttaataagatttttcggttgaccgagaaggttagataaaaaattgcgcgttatttcaccacagggacgcaactagaacggcaaaggtccatcccccggtgctccgaacggattcgctgtctgcggtgcaaaatcaggcgcgggagaaggaggtacggaacctgcattacctgtattcattttcgatcctaacatagccccggcaggctcacccggcatcgggataaccatatcgtcctccggattggagaaacgggtaaattctcccttaaaccggagcaacacctcgcctaccgcaccattacgatgcttggcgatgacaatctccgccataccacgcaggtcattaccacgatcatcctgataaatcttatagtattccggacgatggataaagcacaccatatcggcatcctgctcgatggctcccgattcacgaaggtcactcaactgcggacgtttaccatcaataccttcacgactttccacaccacgattcaactgcgacagtgcgataatcggaatattcaactctttcgccagtcctttcaacgaacgggaaatggtactaacctcttcctgacggctaccaaatgccataccgctcgcattcatcaactgaaggtagtcaataataatgattctcactccatgttcacgtaccagacgacgcgctttcgttcgaagttcaaatacagacagagacggagtatcatccacgtaaagcggtgcatccatcagattcttcagtttatagtccaactgttgccactcataaccagccaactgtccgctcttgatctttccactttcaatttcgcagacattggaaatcaaacggttcaccaactgaacgttactcatttcaagagagaacaacgccaccgggttccgataatcgacagcaatattcttagccatagaaagaacaaaggcggtcttacccatcgcaggacgtgcagcgataatgataaggtcggaattctgccaaccggaagtcatcttatcgagctttgtaaaaccactctcaagaccactcaaaccgtcggttcgcgccgcagccttctgaatcagcttataggcttcgtcaatcaccggattgatctgcgtataatcctttttcatgttctgctgcgaaatctcaaaaagtttaccttccgcttcctgcatcaagtcgtccacatccagcgtttcatcgaacgccttactctggatattgcttgtaaatgtaatcagctcacgcgccagagatttctgtgcaataatacgggcgtgatactcaatatgcgctgatgaagccaccttactactcaattgagtaatatagaacgggcctcccacctcttccaattctccacgtttgctaagttgttcctttacagtcagaatatccaccggcttctgattcaccgcaagatcggtgatagcagaataaatcaactgatgccggcgttcgtaaaaagattcgggacgaagaatctcactcaccaatgagtaagcgtctttttcaatcatcaaagctcccaaaactgcttcttccagttcaggcgcctgcggctgaatacgtccataatcatttaccggttgtattttagtagactttgaattgcgggtatttcttttctgttcggccatcgaggtatttactattttacaatttactatttactattttgcgaccggacaaactcctttataacagagtttttccagtcgggacgacaaagatagaatataatcatgaagaatggataaggaaaaatgaagattttactaactttgctcccgaattacattcaacacatgattaattgtcatgtgcggcactgcaaatagtaaatcgtaaattgtaaaatagtaaataaccttatgctcgcttttcctaatatcaaaataaacctgggactttccatcacggaaaaacgcccggacggatatcacaatctggaaaccgttttctatccggtagccctcgaagacgctctcgaaatccgtacttcttctgaaacagaaaagaagattatcctccaccagtatggcatggagatagccggcaatccggaagacaatctggtagtaaaagcctatttattgatggataaggaatttcatctccctcctatcgaaatccacttatacaagcacatcccttcaggagccggactgggaggaggatcatcggatgccgctttcatgctaaagttgctcaacgatcattatcagctgggagtatccgaagaacaattggaagtatacgctgccactttgggagcagactgcgctttctttatcaaaaacagaccgatatttgccgagggaattggaaacatcttctccccggtcgaactttcattaaacggctaccaaatcatgattataaaaccgaatgtttttgtttccacccgggaagccttttcaaacattcatccccatcgtccgaaatatccggttagggaggcaatccagcgtcctgtacaagaatggaaggatacgttaatcaatgatttcgaagcaagtgtattcccgcaacatcccgtcattggagaaatcaaagaagaactctatcatcaaggagcaatctacgcctccatgagcggctccggttcttcagtcttcgggctgtttgctcccggattcgtcttaccggaaattgattggggaactgacgtattctgcttcaaaggtacattaaacaaataaatctcactaacaattatgttttgactattttttcaaaatcccaacatggcagcggggtgtatattgagtacccggcaaagcaagcgagctatttttaaagtaggttccgagcgacccgaaatataatcattcacgcgtgaagggctaacccctatttcactggcaagctgtttttgtgtcatccccttttcttcaagggacaattctatcaattctgctacggttggtttttctataggaaaatgttccttctcatacgcaatcactatatcagacataacagaaagctccaccatgctcttgtcatttgcaggagtgctgtcgtccaccaaaggcagaagttcttcgactcttgccaatgcaaattcgtattgttctttcgttattttagtcatatctattatattatatagttgaacaatctattttatcatactctttatgagttcccacccaacggacaaaaatgtatcccaccgtaaatttaacaaccactaccagccgatagttgttccctctgatattaaaaacatagtgttgattgcccacataatcagtcgatagaaaatccgcttttatatcagacaaattccgccattctgctttttccgctatatcataccaacgttctaaagcaacacgtgaatcttcacaccctttcgtctcgtagaaatctttcaatttcttatgtgatactactctcatatcttattcatttgatacaaaattacaaaataattttggataacaaaagaattagtgctaaatattttataaaacagaatacccatgttgggcgtaccaaaaaacggtaccacgactcacgtcgtagtaccgtcacaacacaaacacaaaataaaacacgacaaaactactatgcaatctttcctgtctatgccggggaggcataagtactatctacgtatattcgcatactcataaacagcttcaggtcgattagcatcaattaaacaaatcgcatgcacgatttgtttaaacttttatgttatttaaaacaagtttctcttttattgaatccctctttcacggagtttcagctgccagttccatgcagagcgtaaagtatcttctaaagtttctacggctttccaacccagctctttattagcaaaatccgggttagcccaaactttttcaatgtcacctgcacgacgtccgacaatctgataattcaattttacgccagtggctttttcaaagccatttattaattccaatacagaaacaccacgtcctgtaccaatattaaatacttctactttttctttttgtgtcttttccaagatacgacggatagcaatcacgtgtgctttagccaagtcaacgacattgataaagtcacggatacaagaaccgtccggtgtatcataatcgtcaccaaacacgctaagtttctcacggataccgatggctgtctgggtcagatatggaatcaggttttgaggaaccccgttaggcagttcacccaacaatgcagtaggatgcgcgccaatcgggttgaaatagcgcaacatgatcgcattgatcggagcacctgaagctaccgtatcacgaataatctcttcattgatctgtttggtatttccataaggtgattccgctttcttgatcggagctttttccgttaccggcagctcgtccggctgaccgtatactgtacaagaagaagagaacacaataccttctactccatgttttggcatcagttcgagaaggttaatcaaagaaaccaggttattacggtagtaaagcaacggtttttgtaccgactctcctactgctttgctagctgcaaagtgaatgattgccttaattcctttatattttgcaaatactgcatccagaccggcaaagtccaaacagtccagcttttcaaaaactgggcgaataccggaaactttctctatattgtcaacaacgtcggcacttgaatttgataaattatcgatgatgattacttcatatccactgttttgtagttctacaacagtatgagacccaatgtatcctgtcccgcctgttactaaaattctttctttcatatactttataaaaaatggttagtttctcggcttattattgtttgagttacaaatgtatggaaataaaatggaattgcaataatctgccacaaatttatttgctgaaaagtaattaaggtacgatttggtagcatttaggtataaaaaagaattggaaactctaacctgtatgtcgccacacagcagagcttccaatcctctatttaattatcaactgtaaatccttacaccacgccggagaatcccatgaatgccatagcaagcaaaccggcggtaatcaaagcaatcggagttccttgcattcctttcggaattttcacaaggctcatctgttcgcgcaatccggcaaaaagcaccagtgccagaccgaagccgatagctgtagaaaacgcgtacacaacacctgtcagcaggtcatagtctttctgaatcaccaggatagcgacaccaagaatacaacagttcgttgtaatcagcggcaagaacacacccaacgcctgatacagggccggagacacctttttcaggatgatttccaccatctgcaccaatccggcaatcaccaggataaatgtaatcgtctgtaagtatcccagtccgaaaacatccagtacaaatttctgaatcaggaaagtgacgatggtagcgatggtcaacacgaaagcaaccgcagcgctcatacccatcgcagtttccaccttcttggatacgcccaggaacggacagatacccaggaactgcgacaacacgatgttgtttacaaagattgccgaaataaatatcaatatatattccatattcttttcttatttaattgaattaggctttcttgaaactgttaatcaacgctatgaggtatcccaaagcgatgaaagcgcccggagccaatacaaacaccaacatcccatattcttccggcatgatggtcaaatcgaagattttaccggttcccaaaaactcgcggacagcacccagtaaagtcagggcgatggtaaagccaagccccataccgataccgtcgaacatagaagcgactgcgttattcttggcagcgaaggcttcggcacgtcccagtacaatacagttcactacaatcaacggaatgaaaagaccgagtgtagcatacagtcccggcacgtaagcctgcatcaccatttgaagcaaggtcacgaaagatgcgatcaccacaataaacgatgggatacgcaccatgtccggaatcaggttctttattaaagagatcaccacattcgagcagatcaatacgaacatggtagccagtcccatacccataccattgatagccgatgatgtagtacccaatgtaggacacataccgagcaggagtacaaacgtaggattctctttgataatcccgttcatcattactttaaagttattcatatctgtctcctttcttatttagcactgactgaatcagttagttcaactttgatcgtagctcccgtagcagcgtcagcagcatctgcgtccgcgcctttcgctttttgagaagcaccggttacaccattcacttccccgccttcggccttataggcctgataagcagcattcacggcattcaagaaagcacgtgaagtaatggtagaagccgtgatggcatccactgctcccccatctttactgacggtcaacggagcttcacccggattcatacccaaaatagatttcgtactctcttcgtgagatactgctttttctcctttcgcgggatcatacgctccgaaccatttgtcggctttagagcccaatcccggagtttccgtgtgagccaacagagagtagttatagatttttccttcggcattaaagcctaccagcactttcagttcaccgccaaatcccattgatttagcttcaacagccgtacctacaagctcttcaccgttcttagccggataaacgataaagtcaacattcttctttccatctttctcactgaagatcgtatcgctttccgctaccggattattggtaaattcgggaagaacctttttcaaggcctcgttcagtgtcttcgcgttcgcttcggcaatggggccttttgtcagttcatttacataagccagcaacgcaacggaaatagcagtcactcccgtaagtaccagcaacatattctttaaagatgattctaactttttcatttcttcttcgctacctccccaaagcgttttggtttacaataggtgttaatcagcggagtgaacgcattcataatcaggatggcgaacgacataccttcgggataggcgccgaacagacggataactaccgtcagcagaccgatacatacaccatagatcagcatccctttcttactcatcggagaagtcacatagtcggttgccataaagacagcacccagcatcagaccaccggaaagcaactgcaataccggagaaacgtatttttccggatctgccaggtgcatgatgcctgcaaagacaaacacagtagccaggatagacacaggaatatgccaggtgatgattttcttccagagcatataaacgagtccgatcagcagagccagtgcactcacttcacccaagcatccgccattctgtccgatcaacaaggtcaatgcgtccggaatctggcttaaagcggcagtgtcaccgtaaatggcttgcttcatcaaggccagcggagtggcaccggtggtagcatccgtataagcggtcaactgtccgactaccggccagctggtcatctgcaccgggaaagaaagcagcaggaatacgcggcctgccaatgccgggttgaaaggattgcagcctaatccgccgaaagacatcttacctacaccgatagcaaacagtgcaccgaggatgataatccagataggcaggttagacggtaaattaaatgccagcaacacacctgtgatgatggcagagccgtcgcagatggtggtggtcggtttcttcattaaatattttccgatcgcccattcgaagaacaaacaagccgcaacggaagtagccgtgacaatcagggcacccagtccgaagaaatagagagacaccagaaaagccggaatcagtgcaatcagcacgccatacatatttttctgtacgctgtctccgccatgaacgtggggcgatagtgatacgattaatttattttccatattcgttattttttagcttgacgtgcacgaatcatagcgcctactttgcttttgcccagacgacagtagtcgagcagcggacggttggcaggacaagtgaactggcaagagccgcactcaatacaatccatgattctttctttttccattgtttcaaaatctccgttttcggacaaagctccgagcaagtacggttccagtcccatcggacaggcactcacgcacttcgcgcaacggatacaggtctgcgcctcaccacgtttggcttccttttgattcataatcaggataccggaactgcccttcgcagtaggaacctcgatatttaccaacgccttacccatcatcggaccaccgccgatcaccttacccgtatcttcgggcaaaccaccgcaagcgtcaatcaactgtttcatcggtgtaccgatacgagccaggaaattagacggcttcgcaaccgactttcccgtcacggtaatcacccgttcgaacaatggtttattcttctgcaccgcttcataaacggcaaatgctgttcccacgttctgcacgactgctcccgtagagattggcaatgcaccgctggccacctgacgcttggtgattgcatcaatcagctgcttttcacctccctgcggatatttcaccttcaagggaacgacttcgatgcctgcatagctggaagctactttagtcatcagttcgatagcatcgggcttattattttcgattccgataaatgccttgttcactttcactgctttcatcaggatggaaacacctaccatgatttcttccgcgtgttccagcatcagctgatggtcggcagtcaggtaaggttcacattctacggcattgataatcacacattcagctttaaaagaaggaggaggacaaagtttcacctgtgtagggaaacaagcaccacccagaccaacgattccggcatcggcaattttcttcacgatctcttctgccggaagttcacattccttcaccagtgttgcgctacggtcgattgtttcttcccattcgtcgccttccacatcgataaagatagcaggtttcgcataaccgctggcatcgacaatagtatcaatcttcgccactttaccactgactgaagagtgaattgctgccgaaacaaagccggcaggttcagcaatcttagtgcctacctttaccacatcccctttcgctacaaccggttttgcaggcgcaccaatgtgctgccccagcaaaataacagcctttgcaggaacttccgctgtgataataggttgatgtgccgacaatttattttcgtgtggatgaactccaccaattgaaaatgtctttaacatacagttctgtattttattctgttattattctgttactttcggaacttctgtagccttttcagcaggagtttccacttttgccgccggtgcaggagtttccaccgcttctttagaaacagcagccggttttggagcagccggagcttcttctttcggtttcctcggcgggaaattcaattcgataatggtattctgcggacagacttccacacatttccggcaagatttacacttgtgcggatcgatgtaagccaagttgttctccaacgtgatagcttcgaacggacaagtcttcacgcatttgccacagccgatacaactcactgtacaagccttgcgtgccacagctcccttgtctttattcacacaagagatatacacacggcgtgatttctttccttgcggacggatttcgatgatcgccttcggacaagccttcacacaggcaccgcaagcggtacatttcgcttcatccacttccggaagtcctgtttcaggattcatgtggatggcatcgaactggcaggcagccacacagtcaccacaccccagacatccgtaactacaacccgtttccccaccatagagcgaagcggcaatagcgcaactcttcgcaccgtcgtactgattaatacgcggacgattcatacacgttccgttacatcttaccactgctaccatcggttcagcttctccggctgcaagccctaggatatcagcaatttgtgccatgacaggctgtccgcctacggggcagaatttaccatccagcgaaccggctttgacgcaagcgtcggcaaagccgctacaaccgggatagccacatccaccacaattagcctggggaagcacttctcccacctgggcaatccgcgggtcttcatacacggcaaatttcttggaagccacataaagaatagcggccagcacgagcgctatagctcccaatgaaatcactgcaatcagaatcaaattcataatgtttttagttatttattggttttatagtaaatgaaaattgttgtttgagtcgcgttttgttaagccataaaacgaaataataaggtataaggacagccagagaaagaagagctgcatacagttcattctctatcaatgccatcaaaagaaacaacgaaaatataagaagtacgaaaggaagtacgaaagccaacactaccgccatcatgcccatcgacgtttcgccgaccaccatcaccttctctcccacctgataggaagaagctgcggtatctatgatatctatgattttgtccttactatccgccgaggaacaatgcccctttgcgctacatgccgcacaagccgatgtctggacaatcctcaccgacagatgagaaccctgtatgttttccacaatacctagatgctttatagtattattcgtcattttgcaaactccgcattacaaatcgcggcaaatttaatcattatttgtgaactacgaagcattcccccaactttttctacctaataaaatgttattttttgtgttttcgttatcgcacacggaaaagatatgcctaccatttgatattttctaataatgacaaatagctatccaaaacaagaaatcccagccgttttatttcttcagccgggattttccatcaattatttcacagattattccactatccacctctcaatattccgcattttcgcgtcaaagttcactcctattttaaataatcggcgattgccgtcggcctcaaaaggaagtgcataatgtttctcgttgatttgtcgtaaggcgtcttccgctgtcccgtcaaatttgaattctatcacataaacaagcttatcagtttgcagaactaagtcgatacgtccttcacttgtgtggtattccgccttcacataaaatccgaccagtttaaagactataaaaagtacattctgataatgcaattccaaatcacggataagctcataaggagtatcagcaaagaaactccggagacgacggaaaaaagaatcataatctccgacacgtatttcacgaacaaacttttgtatttcaaactccgtctctaccgcattggtgtttgcataaaaaggaagcaagaatttgatgaacccttcctctacttcgcgattcgggaaccctaaactgtaaattccaaattcgttatcatatccttcgatagtgagataaccgctctgataaatgaccggaatgggattgtccgatgtcgaatcaatactgttcaatacagcggcactcgtttcctcatgcgccatacgtcccaagtcataatgatgttttttcagcaactccactagataagtaggagttcccgtttcaaaccaataactaccgaactctttatatttaaaagtattaagcaagctgaacggattatatattccgatagaattgtatgtaaaatgatagccatcatagtactccctcaatctattgcacagttcaccataagtcagctcctttgcatccgccagttcatgcagttcaatttccagattatcatgcaattctttttcagaaactccgcaaatatccacgtattgcttccgcattgagatgtcatcgagattatttaaatcgctgaacacgcttaccttaccgaatttcgtcactcccgtcaaaaatgcaaattgaatacaaccatccatggtcttcagcacactataaaaagctttcatggtattacggaattccttctgaagctcctcattacctattgcttgtaacatgggcttatcatattcatcaatcagaatgacaacccgttgcccggtttgcttgtaagcccgttcaataaggccgcgaaaacgcaatgcaaaagttgtttctgacggggcggtgccatattgctgttcccatttctccaatgtgaaattcaatatgctatccagactctcccgcgtatcatacttctccgtattaagatcgatatgaaaaatgggatatgtaatccaatccttttccagcttttccatggccaagccctcaaaaagttctttcttgcccaagaaatacgcttcaagcgtagatatcaacagactttttccaaaacgacggggacggttcaagaaataataactgcctgtcttcaccatctgataaatcaaagcagtcttatcaatatagaaataaccgtctttccggattttttcaaagttctgtataccaatggggtatatcttgctactcatactcttctaaaattatttaaattacaatgcaactatgcgtacgtctctcttaaaatcacccaatcagcaattgtccgagtctccgcactaaaatttattgcaacctttaccaccggaagcccgcaaagagcaaaacgatctgcatattgctgcaaatcaatttgcttcatggcagtctccgcattttgattcaatttcagctctaccagataaagagtagtcttggtgcgaagcaccatatccacacgtcctttcagcgtgtgcacctccacatcggtataaatgcccagcaatgagaatatcacatatagcatctgctggtaatgtccctcataatccgtgttgtcgcaataaggcacagtggaaagaaaagcctgaagcagcttcaaagcctcgtccatatctccccgcacaatgttacgcgccaaattacgcaccacactgttcacctcatgactgtcactcgtcacataagagggaatcaggcttttcatcagaccgatacgcacctctttgtttggaatatcaagcatatacgcgtcaaattccaaatccgcaccctttatcgtaaggtaaccggcctgataaagcaacggcatataattagtcgccaactccaaaggtacgttaaaatcactgggagacgcttcctcgccaccaatttctgatggcaacacagcatatttgcgcagcatctctatgatataagtgggtgtgccactctcaaaccaataagagccgatctctcccaaagccatcgccttcagcaaactgaaaggattgaaaacatcgggcgacggccacgaaaaatgataaccatcataattctccttcagtttgtccaacatctcttctgcagtgattcccaaccgggtagccagactctctacatcgggaaccatttgagtgcgaagttcttcagcagtgataccgcaaatggcagcataatcaggcagcatactcacattggtgatattattaagttcactgaacacgctaagttgcgaaaacttggttatacccgtaagaaagacaaagcgtaaataaggatcacacgccttcaacggactgtaaaaattgcgcatcacattacgcaactgcggcagatttttctcctcatgaaccacatcgagcagaggagcgtcatattcgtctatcaagacaaccacttttttaccggtctgcttataagcacgttttataagtccctccagacgctgattcacatacagttcctcttctacacgtccataaatctcctcgtatgccatgagtttcaattccagttccgcgttcagttgctccctgtccacatgtttagcggtactcatgtcgaagtgcaacaccgggtgttgtatccattccttctccaatgtctctatggccagtccctcaaacaaatccttccgtccctcgaaataacagtgaatggtactggtaagcaatgattttccgaaacgtcggggacggcttagaaacagatagctggaagccgaatgcgtcatccggtacacatattccgtcttgtcaatatagagaaaattcccctcacgtatcttaaagaaagtctgtatcccgataggatataatctttgcaaatcttccatatcaatcttatttttcacaaagctacaaaaaaattcattcataaagaccgcaggcgggaaactttttcccgcctgcagcttttactttatctgttttcaccgttctcctctctcctcctcttttcttctcctgtatcgaaaatacattctcctccattcatcccagataaccccggcttcctcttcattgaaggcatccagacagcactccaccacttttacgtaatcactcaatgggcgttttgccccttttttaaatcattaaaagtagagtggccgatgtgtacgctcttgcatatttcgtcatttttcaaatccgcacgcttttgcaactctcctatgtaaactcctaaagctacataaaaacctttttcattttccattcttttttattgttaaaatcacaccgtaacggttaattattttcactttcatcccaacatgtcgggacgatgtctattttgcatttactaattttacgccgtgttttgaaacacactcatattttttgcaaaaataaatattttaacttgaaacaaaaagaaaatgatgccaaacaactacagaatgtcctatttcatgccacctatcgctcctatcaaagacaaacaaggccgactgatgactcctcccacgcttatccccttctgcgaagtctccatcgaacaagttttccaaatgattacttgcaacgagaatctcaaagccctgaccgaacaagtacgcaactccgaagatatacgaaccgccaaagcgtcattactaccatatgtgaccccctgcggcacattcacccgccgtagcagtaaggatttcgtctccccgtctcacctggtgatagtagatgtggacggtctccactcttatcaggaagcagtggaaatgcgacgtatgctctatgacgatcctctcctacaacctgtactcacctttatcagccccagcggactgggtgtaaaggcatttgttccctgccattattcctccacgacaaatgatgtccaaaatatcacagacaacatgagttgggcgatgcggtacgtagagacggcatacaatacggtaacagcagtttcttccgaaacaaaatccaaagtagatttctccggcaaagacctcgtgagatcctgtttccttagttacgacccggaagcattgttcagaaccaccaacgaataaatcataaatcaaaaatcataaatccaaatgactgatattgaatctttatgccgtctcaccgaagcagtcgaagcggcaggagcggacattgctcccacttatcttgaatacgtacaattgtcattcgccatcgcaacggattgcggcgaagcaggacgtgaattttttcaccgcctatgccgggtgtctcccaagtatcagcgcgaacatgccgaacgggtattctccaacgcactccacacccaacgtggagaagtgcacctgggcaccgctttccacctggccgaagcgacgggagtcgccatcagctatgtggagacagtggggacagtaaggacaacccctcaaactctcacacaggcacgcgcgtataataaggtggcaaatgaggaaacagacgaagaaacgatcacggaagaaaaagaagaactgctatccggtagcgatccgcaacacccgctccccactctgccggaagcaaactggccgaaactcctgcagcgtatcatcaaagttgcgaaaagtgagattcaacgcgacatcatgctgatgggagcattcaccgcgctgggagcttgcatgtcgcgccacgtgcgatgcctctatggcgacaaatactattatcccagcctccaatgtttcatcgtggcgccctctgcttccggcaaaggcatcctctcctacctccgcctgctcgtgcaacccatccatgacgagattcgcgcgaaagtggcggagcaaatgaagatctataaaaaagaaaaagccgaatacgacgcgatgggaaaagagcggtcgaaaatggaagtcccgcaaatgccccctaacaaaatgttcttgatttcgggcaacaacaccggcacaggcattctacaaaacattatggactccgaaggtacaggacttatcttcgagtcggaagccgacacactgtccaccgccatcggatcggaacacggccattggagcgacacgctgcgcaaagcgttcgaccacgacttcttgtcctacaaccgtcgcggtaaccaagaatatcgggaaacaaaaaaagtctgcctttcgctcctgatgtcgggcaccccactccaagtgaaagccttcatcccgacaacggaagacggaggatcctcccgccagttgtactactacatgtacggaatcgacaaatgggtcagccagtttatagacgacgaaacagactgggaagaggtattcaacgctctaggactggaatggaaaaaacaactggacgtgataaagaagaatggtatccacacgctgcagctcacgaacgagcagaaaagcgaaattgacgccgtcttttcggagttgttcgatcgttcgagcatagccaacgacagagaaatgtatagctttgtggcgcgtatggctatcaatttgtgcaggatcatgtcggaagtagccgtgttgcgcgcgctcgaacacccgaatccctacagcctccaaatttcctcctcctcccccttcacacccgacaagtctattccttcggacaaccgcaaggacggcatcgtcacccgctggaacgtatccatctcggcggaagacttccacgccgtattaaatttggcggaacctctctactgtcacgccatgcatatcctgtcattcctccccaacacggaagtcagccaccggcccaatgccgaccgggatttcctcttccagcaactgggtaaggaatttacccgcacggagttgctggaaaaagcaacagctctgggtatcaacaaaagcaccgccatcacctggctgaaacgtctcacccgacaaggcaagctaatcagtgtagacggcaaaggaagttacgcgcgtgcgtgtgtgtatgagtgaaacggggaaagtgtccccactgtccccgccttacttactgtaatcgtttggactggtacattcattttgattaccgcatccgtttttactgtataaagcatcgctttagaaggtgtaaagctaagctttagacatcgtaaagcggtgctttatgcatcataaagcgacgctttatttaaggctctcccagggcatccacaatcactctcacctccaatggtgtaaatgaacgtcgctttgattcgtagcctaagtcgtacaggcgttgcagaagtccgggacacaaagagatccatttcttcatttttcgataggcagcaatatcggtaagttccggagaatagagttgcgccagctccatgcgcccgtaggcacgtattttgaattcgttcataatggataagtttctgatttacaattacaaaaatagcaaaatatttctacatagccaacgctttttcattgaataatcgatcataattgcacacaaccgacaacaatcgtacgcaactgtgtactattgattttccggagtttgagggtggtatctttgtatcgtcgaaagggaaaagaatccccggacaatatgtttaaccctttaatttattgttttatgattcgttacaaaatttatcagaaccagcagaagaaaggcttgaatgcgggtaagtggttcgcccgtgcagtaagcgacgagacgtttgatttggctaagcttgccgaacacatgtcgaagcacaattcaccgtattccggtggtgtcatcaaaggtgtgctttcggatatggtagattgcatcaaggaattgttgctggatggcaaatgtgtgaaaattgatgatcttgccatttttggtgtgggtattcgcagtaaggcagccgatacgctggaagagttctcgttggagaagaatattagcggcatgcgtctgaaagctcgtgccactggtaatctgtcgaccaataatctgaaactcgacagtcagttgaaacagcaggcggaatatcagaaaccgacaactgccggaggaggttctgattcgggtgacaaccctgatccgaaaccggacggaggcggcgaagcacctgaccctgctgcttaaaagattcaccactgattacacagatttccacagattataatttaattggtagtcattaaagtagtcgattatttatttctgtgtgagtctgtgtagtagtgtgcatagttgcgtagtttgcagctctgtgacaaaagaaaactgttatccatttatttaaaacctattattgtatgagcaaatcatcctcttcccgctccgtatggagcttcattatcaaagtaatcatcaccgttgccaccgctatcgggggcttgatcggagtacaaagttgcatatagatctatgcgaactattacactgattatcattcattgcagtgccacgccggaaggaaaatccctttcggcggaggcttgccgacaagatcatatcctgcaccgtggtttccgtgatattggctatcatttttacattactcgcgacggggagatccaccggggacgtgcgttagaaaaggtcggggcacactgccgtaatcataatagccattcgataggtatctgttatgaaggtggcttggatgcggatggaaagcccaaggatactcgcactttgaatcaacagggttccctactcgctttactccgtgaattacagagacagtttccaaaagcgttgattgtgggacatcgtgatttgaatccgatgaaggagtgtccgtgttttaattgtattgcagaataccgggaactgtaattgccttgcagcatacaaaaaaaatatcaacgatcttcacagacagttgatatggtgggaaatcgtatcggctttcacactgatacgagggcatagattaggacaataccactgtattgttcctaatcaaccacatgtagggtattcatgtttatcacataaatctagggacctacacatttttcatctcacgttttctaaaagtactttgaagcactctatttctctttattattactagtttctccatagccgtaaccatagccgtatcgtttgccataaccatagtacttgccatatttaccataaccgtaataataaccgtattttcttttcttcaaatccaaaccatttatcacagtacataggttaggtaacttatttccatcaataagttcattaatcaaagtatactcatttttacgagtataatctgcgcgacatacataaacagataaatcagccacacgtcctatcaataaggtatcagttaccataccgacaggggcagtatctaaaattacataatcaaaattcttcttgagcgtttcaatcgctttatccaggccatcacgagccaacaattcggtaggattaggaggaactgttccaccaggaagaatataaagattcttactgacatcggaaagctgtactaaatccatcaagttcttttccggattagccaaatattgagttataccttgttctctttttgatatattgaataccttattcaaacccggtttacgaatatcgagaccaactatcactactttcttccccaacaaagaaagactgatagcaagattaccagagataaaggatttaccttcaccactgactgtagaagtaaccaaaattaccttcttgtcatttccaagcataaactgaagattcgttcggacattgcggaaggtttcactcatcaggttgttttgattctcaaatacagcaatagcaccctgcttttcatcagttaatgggatatcaccgacaataggtgcactggttagtttttctacatctgcacgaccttcaatcttaaacttagtcaattcgagcaaataaataacccctaccggaattccgactcccaatatcaaagcgatcaaataagtaatcttacttctaggagacacaggagcatcatccgctatagcatcatctataatctttgcattgttggcagtagcagccaaagttatcgcattctcctcacgcttctgaagcaacatcagataaagtccggccttaatctcctgttgacgtgcaatactcacaaactcacgctcttgaccaggtgcctcactaatgcgacgggaataacggttcgcctcacgatccagatcagcctttgtgatgaacaatccacgcaaaaccctatctaaagatacttgtacattctctttcattgcactaatgctagtatcaagatttataatggtaggattattctccgttgatgtacgtaacaaacgtttcctctcaacaagcacatcattataacgattaatggcagcggcaagattcacatcctgcaatccgatattactaggtagaacctcataaccttcattccgcatatatttctgcaaatcctgcagcaaattaatctgggtttgattctccacacgcttcttttcatattcagcactacccgtcaatgcgatctgtgcatcactagtcaaatctgtaatacctgctcctcgcttgaaactttccaaatccttttccgtactacccagttccttcgagataatactaatacgttcattgataaattctgcagttttctgtgccacttcattcttatcattattcgtattgatattatacatctccaatagcttattgataaaatccttgccgcgctgtacatttgaatttttcaatgatatgacagctacagaagtagttttggaagtaggttcaatagtcatattcttgcaacaccatttcgctaccgtcaaaggcttattaattgttgctgtaatattgcgtgtagtcttttccaaatctgtagtttcttccaatgtttttttagaagataataccgagtccggcgtcaggaaaaaagccaatgtccctttatcggtaggaaaaaccgccggcaatttctcaaaatgtttctgatattcatcatcgtcaatcttcacagtcacatccatacttccctgtggttgtaatgccatcttcactatcatcggctcctccaacaaatcagcctcctgcggagtcagactcacttgtacaggtgaagtcttatatatgtttctggaagggaactcatcctcatctgtataagaaatatagagtcccaaatcttcaaccacctctttgacgatagtctttgaacggagaacttcaatttcgttatcaatattctgcgaagaagagatcataccatccaatcccagactctccaacccggaaagcattccggcactaccacctttcttatcatcctttattaaaaccgtagcggaaatattatatacgggagtggacatatacaaatagacccaagctgcaatcaaacacgccacaaccgcacctacaaaccaaggccagtggatcaaatatttaaacaagagttccttgacgtctatattttcttccttagattcttttgcttcgttgaaatctgtttctttcattgcaaatcattattttaaaatatttactaataggctgacaatggataccaggatagaggtagcggagaaccaaagactggtactgttgcccacatccgaatttcgagcttttgctttattgggggtcacatagacaatatcattctgctgtaaccaatagtaaggcgaaagaatggtttcggccttattcaaatccaaggttacaatttgctgtttaccgtttgcgtcttcacgaatcaacttcacattatcacgaagaccatataccgtcatatcaccagccatggccaaagcttctaataaatttaccttctcattagaaatagtaaaagttccgggacgagtaacctcgccgataacagatattttataattgaccatacgcaccgttacaataggagtctccttcatgtaaggcttcaatttatctataatcagctgttccgcttcccttttcgttaagcctcctaacttcaattctcctaatacaggaaaatttatatttccttcattatctaccaaataaggttgtaatacaggttgagtagtcacataagacgaagtactcactgctattccggcattgctggccactgtcaagttaaaaggtatcgcaagttcaggattagtacacgataccacaatagtcaacaaatccttgggcatgatttttgcatcatacaatttttcctgttgttctacctcgttcacaacttccacattctggaaatagggaacctttttataagactgacaggcagccaatagtaatggcaacaatagtagccacaaatttctcttgtttagtcttctcatcataattcttaaattcataattaaatgccctttaattcctaagttttattttttaatatgcttctttttctccatgtatggcattatacaccgtcttatacataatatataagtccaataaaaaagtccaatgctctatataccagatatcacgctgcacacgaccctccatctgccagagctctttcgtctcaccgcgaaagcccgtcacctgagcccagccagttattccaggtttaacgaagtgacgaaccataaacttatttatcagattggaatattcctccgtatgcttcaacatgtgtggacggggacctacaatggacatatcacccttcaacacattgatgaattgcggtaattcgtccacactagtctttctcattatctctccgatacgtgttttacgaggatcattctctgttgcctgaagagtatcacattgcgcattaaccttcatcgaacgaaacttgtaacaccagaattcacgaccatcctcaccactgcgtttctgtttaaaaaaaacaggaccgggagaacttagcttgatggcgattccaaaaaatatataaacgaacgggaatactgtacaaagaaacagccctgaacaaacgatatcaaaggcacgcttgataatacggttctccaatgactccaatggttcacaacgaatggaaagtacaggaacattacccaataattcaaaatgcatcctacgtttcaaataattacggacattaggaacgctaaaaaaacgaaccagatggttctcacagtaattaatgatgggaacaatctccgcactgcgtacagaaggaaggctgcaataaagctggttgatctctcctacatgtttttctaaaaaaagatttacttcactgggttgtcccaaatatggaacatcctgtggatatcggtccgaaggaaaatcctcgaaataccccagtacacgataaccggacgtaggatcatccgtcatcgcatgataaagttcctgcatattctcatggctcccaaccaatactaccttgcggacatttccgcccttttttcgataaatctccagtaagtgacgggaaattaagcggtagctaataatgacaattatcagtgcaacataaaacagtccgaaatagcgggaatgagaaaaatgaaaatgaaaaacaagcaacgtacaaaccgataaaaagacaaaaggaaccatgttacgtaaaacacgaatcatgatctgttcaggacgaaccacaggacggtgaagaataacacctgaatgcatgttacaaagtaaataacacagggtgataagagtcattccctgaaagatagaaccacaatggatacaccagaaacgggtacccagaaacaaattaaatccccataaaagcaggttcagcaaaataagatcccccaaaaggaccaaaaattttaggactttgttgaaacgttggacttcctgcatatactatatttttataattcttatctggaataattacctattttttcagtaatgcgagtacaaattgcggtactttccaagccattttttccaacttggtcagagtaggccataatccgtgtgagacatataccctaatatcctcttcccacatcttcttacgtttagcgctatcagtagaaagcccacccatacgcatccgcacgacatattcattgagatatgtcaccgtgagtccaccggtcaacagataacgtaccaataagtcactatcagctgcaattttataactctcgttataaagcccctgtctcatcattacatcgcgtcgtatatagcaagtgggatgaagaggaagccatccatgacgcactttccaaagacgataccctcctccaatccagttgcgcaccactttattcgtatcatcaggattcacaaagagaccatcaccatacaagaaatcagcatgtgtccgtttcatccgttctacaatgcgcccaattaccccattatcatagaaaaaatcatccgaatgcagcaatccgattatctctcccgtagccacacgaatacccttattgatagcctcatacatgccatggtcaggttccgatataataatcgagatacgatccgcatattctcggataatatccaacgaaccatccgtactggagccatccaccactataaactctatgtcattataatcctgtgctaagacactctcgatagcaccccgaatcgttgctgcgcgattgtagcacgaagttataattgaaactttcataaaatcccgctttatccattagtaaaacatatactgcctctgttactcatacttatgaatccaatccaacgtaaccttagtaccctctaccctcgataccggcaaatgaggagctattgattttataggctccagattatgaacattatccgttgtcatattatgcagtcggaaactcgtcataggaaaagcgatccctatcttttttaagcaatctcccacataccccatccatcggaagcaaaaataagggacatgaggaatttttatactttcgatgtttgctatttcattagcccaatctgtgatcgaataggcctcataatcacctaagtaataaatattccgattgactttttccggagaagcccggagaattgattctatttgatatattgcattatcaatataaccataagtttttttgcaagccttttcacccatatggaaatacatatgctttagaacaatatgaaagaatttatcataaggctcgccaaaccaaggcccccaaatgcttgtaggccgaatgatactccagatgtaagttgtaggattggcctttttaattcttttttcggtttccactttactctctccataaagagtatgaggtgcataatcttcaaagtctttgggcatataccccggttcgcaaacatacatagaagatgcaaaaattgcacgctgtacacttccggcttcatttatagccgctaatacattgctcactccgctcatgtttgcatcataatcttgaagcgtaacacccctcaaatctgtacgggcagccagatgtatcacaatttcaggctgaaacgctctaaatacagatacgacactctccttatcacatatatttatttgtttccaaatgcgattatgtgcactgattttgggcttttcaatatcaatactaagaagttcaatgttctgatttaaaaggaaatgttcaataagattagtgccaataaatccgctacctccggtaattaatatctttgtcatctaaaattctattagttatttacatgtttcatttgcatcagaatattattagcaaatgatttatcattatacttggattttgctaataaatatgcattttctcccattgatttaactttctgtggattgtcaactaaaaaatttatagcattgatccacccatctacatcatgcctctttaccatcaatcccacaccctctttttcaacatcaatataattcgtgtcagcctctgtgataataattggcttgcccattgctaaagcctccactaaaacagttgccccatttgggacatcattagcgtaatctatcggcaataaaaccgcaatacaattataataatgatagcggagctttacgtatgcttcataataggaacatccatccattaaattctcaaatgaaatgtttggtggtaataattgtccttttgtataatctctatatttactaaatattttgactccaggctttttcaaatcaatgtgtctaaaagcctctattaaagttaaatagtcacggttcataccacctgccgcaacaaaataatctccgtttgaaggctgtttatacaatcctctattatagaaagccaaattagcaccccaatttgcaacattacaatgtctaataggaatatgataatcttctttagctatttcaagaagggattcacaagcaaatgagattttatctattgctttatagacaaaaaatctctcgattttcttatatatttttttccatctgctatccgtatattttgtactatatgagaaatgtgaaagaacaaatattggagttttaacccatccaacaagacgaaacaatgctaaaggcaataaatgcatgtcaaagccaacatatattacatcataattttcacccccctctaattagttttatttgacaaaacaattgatttaactgtggcatcttcaaaaacttacatatcttatatatatgtgatgttctactgtgcgtataccatacaatatctatcttttcattccttaaagtataataaccaaattgagtattcactatttcagataaatcaatatttgtatcctcgaaaggctttggccaaggaataagatatagaattttcatttagataaaagatttaaatattcttcctgataacgtttagacattatttctgaagtaaattctttaatgtaaagactttgaatatgtcttgaagctttaagactgtccagctctattatacctattataccttcaagcaatttattctgattatgttgatcgtaaagaatacctgtatcatcacccagcattttcataaccgctctatgcgatggaatatcagacaaaagcataggaagtccaacactcatactttccaacaaggtattcgccaatccttctgtattggaagccgatatataaaaatcagatgcaattatataatcataaaccctgtttgaaaaaccaggcattatgatatttgaactttcttgttttttaagtttatcccacatgggtcccttacccagcatcacaagtccaatgtctgatctatcgagtaaacgaaacgcactgatgacaatatcaggattcttttcctgtgagaatcgactaataaaaatgaaatatttcatcccctccttcaatccaagttcttttcgatattttgatttttcatcgtcattatgcttccaaacaggcatagaggaaccattaggaatacatttaaaatcccaacctttattagttaaataatcttctctaatattgggagcacaacaaatcccattttttatccaacgagtgaaaatatgatcaagtaaaataacaatttcacctttaactttaccatatagtacaacctgaaactcatttggataattgtgaatagtgaataccttaataaatttctttggaagaaatgccataagatataaggaccgcggacaatgagcatgtaacacattcggttcaatctcattaacagtgtcttttaacctcaaatataatgaaataggattcagaaatttattcttcgaaagttgatatatacttataggtaattttgagaaatcatacattcttgtcgtttctttctctggaacaaatgtaataatagagacatcaaattttaagaaatcaatattcttaatgatgttatacattacattgacaggaccttcgttgcatagcgaggacactaagtagcaaattcgtttcttttccatagcctacacctctattgaagagcatttttaagataattccatgaaattttctttaaaatatcaagttttgaattcactttatcataatctattttcttattttgcagttcatggtatatgattggatcactttcatcaaaatatctatcttcaagccccacagatttaagtagatcttttaatctactatttttcccattactaggggatatcacaacaaactgtttcttgtaaatcaagctaaaagctaatccatgaaaagagtccgttattacaaatttagctccggcaatatacctaatccaattctcaatcgatggcggatagacatacctaaaacccagtgtaggtctaatggttgaaatcatttttggtgttttaccccaagatttcgatagtccgattgttttctctaattgtaatttagttctattgagtaaataacaaatcacctcatcattattcactatacttcctgttatttcatcatagtcaacatgtaataacgtaggatctaaaacgacttgtgagttgagtttaaataagctattcaaaagatgttttccagtctcttctctaacgcttatgctacaaaatttatgaagagagctatttatgctcggtagtaaactctgatattgttcaggccattttgagattccaaaactagaagcataggagattcttcgaatgtcagattccccaaaatctaagaagtatgccaaacatttaccttgactgatctccggattccaaacttgatcactgcctaccattaaacagtcataatttgaagctattgcatttaagtcgtccatagattgaatcatctttgtttcacttggataaaatgtttccataaatctatcaaacgcttttatcttaaaataaaagattatcgagctattcgatcttttttcatcttgctggaaatttataaattcaacttcatgacctaattcttttagggctcgacacgttgcatagctttgcattactgcaccatagtttgcagaatgatgatatgtaagtaatccgattttcattgcttattgattaaatttcacatagtccttatacatatagcgatgcgaaaccgctactttataatcatccttaaatgtccctacacctatcaaaaggactggaacctcatgactcggaagacgcatctcttgctttattttttttgttattctccatttatgtcccatagtcaaaggtatagtggctaatccgtaataatgaagagagtaaagaagattcattgcgtaaagtcctccatcaacaaaaggaagattttgttcataaaaaccataattcctcaaatcgccacaaacaagaatcgcacattgcatttgcttattaaaccccttgcttccaccttgcaattcgaacatttttgctactaagttattttctgtataaatatgaactctccaactctgcctattacaagcggatggagtacgctcacaaagttttaacgcagcacaaaccttctctatatctaatggcgaattaccaaaatcacgaatagaaaaacgtgattgagaaaataaatcaaaagaacattggattttacctaaaatatcttttagattgagattatatattccaccaacatcattgatttttatattgtatgaagagcacaatttattgagagctacctctacatcaaccatatcagcacccatattctcattaaaatcaatatacttctgcaagacagagacagattcaacaacaaacagtttagaacctcctttctttagcaaatcatcaagatcttcaataatagagaatgccttttcttttccaaaccctactcttacatgaccaatagacattcccttttccaaagcatgtattctgatttgtaattccgcctgctttttaaagatatcctttgtctggttcgtacttccactatacaaagtcaacgaaaaggactctcctattttgtcaaatagaatacgtaaccatacgataaaaacattacctttaatagccgactttaatttttctttcatacaattttaacctaaaaaactatctacataatacttcatcaaacatatctatatattgagaggctattttttctgccgaataataccgttctgtatgctctgccattgaagccttcaacttactataatcacgtgtatacgtatcaatggcagaagccattacgcgaactaaatcatttatatttccaggttcaaaaagatatccatttacattttcaagaatctcatccgaaaaacctggcaaatacgatgctataatcggaagattataattaaaggcaatctttgtaggaccactttgggacaccactctataaggttggacaaaatagtcagcagacacaaatagattagctatttctgaattatctattgaccggatatctatatcaaaaatctctggatatttaattcttgattgataaaaactccaatctttacacatgccattaatcgagactctgaagtttcgatatcctttatcataaagcacgcatgcagcatctattaacaaatcaatattcttagcataattgatagtaccaaatgaaagaaatcgaataatgccatctttagttttttcaatgctaggaacaccaaaatcttttaatgccaaaggtatcttgaatactcttgagttaggaaatcttttttgaaaaagctctgcttgtgacttagaaaacatattaacatatctcactcgcgaataaaccaatctccgcagtacgtttaatagttttttatacttcatgcctacatgaacttctccttgatgtgctgtttgaatataatgctccataggcaatgaataaaatacaggcaactcccatagtgagacactactattcatataaattatatctggttcctgattcattatggcttttccaagtcgtatataggtcccaatattcataggattgcgcatcctaagcttaaagtaaagaaattcaatcgttagattatcattatctttctttattcgttcaaaatctgattctttgaacctattattcctactaaacaacacaatccaatgaatatcataatgctttaagatttcatgcatattataataattcaaatcgcaatcaatgaagcaatctggagtaatccagcatatttttttcttattcatataaaatagggtataaggacttgaactacttttgtttgttaatttaagacttaacgaaccattgtgtaataatacctcctccacatcatataactctttctattatgctccccagacaatacaatatcagtgtgcatatatgtatttattgttattaaatcatatttagtatatgaccataaaatgtagggcatccatttatctgttctattaattcgcctttataagtaagtttaaaataatttgttgtattaatccataaattccattcgtttgaatcaaaagattcattgaagttcttctgtaaagaaagaacatcttcattattatatggattatttgctattaatgtagataatatagaattatgagattgttcatattcgaacaaataatctattaataaataatcaacaggatataaataatgtgtccaattgaagcagaacatattcctaatatgtctaatccattcagagtctggtgagacatacattaatgaaacaaaccatcgatattgacttacacataaattatctttagctttcgtctttattgaataaaattctccatattgtttatatgacggtaaaaagtctgttacataaaaagttgcatctacccaaagccctccatattctgataatagatttaatctaatataatctgaaaaatgtgtgaacgatttcgtctttcccacatccttcattaccctatctggtattaccaaataatcatttatatttttttcagttataagaataaccttccatccatcagaatgcttcaacagactatcatagcattttcttactattggtggcatctgctcctttccctgccaccacagtatccatattgtctccgcgcccaatacgtcaacatttttaaagcacgaagttaattcattggttgtatcacctgcaaaatgtccctcaccaataaacctagctatagataatctctcctcgacaaagtccaatattatcttatgttttctatccaaagcataagttttattttcgaatgactttgcatattttatcgatatatgcctataccaatgaattcgtatagcattccataaaccgaaggcctttatgaaacattttgctttacttagtttcgagttatccataatttatatacaatttaaaattgtttgtatgaatgtatccacattattaacttttgcatatttatcactcaccctatacacctttgtttttaataatgaattaaaaaaatcacagagcccaatgcttgatatgtcatctaaaagtatacctaaatgataatacttaacaagtttcctcgttagattcttgttgtttgctaccactggcacgccaaactgtgaagcatatccaaacattccactactattttctgtattaaaataaggcatcaggatgtattgcgagttcatacataaacctgctaaataatcgaaaggacaaaattcatctcttacaataatattggtttttgatttacatttatttaccagtttatgaaattcatcttgaatattcttatctatttttcctgcaaaaacaaaagtcatatttttagcaattgaattattcactttaagaatagccttcaagatttctagtgtacctttcctagctgtcattgaaccaaaatgagctaaaattatagaatcattagaaataccattgagctctctaaatttcaagaaactctcttctcttttaatgagaacaaaaggatctggtattttcttgtatttttttgtatgaaagtacttattaaatgcacatgctgcagaactatcattgcatataaaaatagaagaaactccatcatttattgacagaaacttctgtatagcatactcctgtaactttcttagtccagccaattccttcatcttataaaagtatacagaatagaatatgccagcatacttaactcctcttactgtaaagataggtagaaatctcattatatctgtaaggtgaatatgaaatacatcagtaactgaatattttaatataagcttcttcaacaacctatttgctttataatcctttatataagcagaattatttgtaaaatccagcttcttcatatcctcatcggaaagaatatatacaataatatcttctcgaccaggaatttctctaatgtacttcgcaaactcaaaagaaagacaaaatatatattcaataccatctactctattagaattgatagcatactgatatatatgatttacatattctaaataatgtcccccaaaattgaactttggtatcaataatcgtttcataaacttatctattcaaataagcatgttgtttttctttcatagccttaaatctgaataggaatagactaagaaatggcaatgcatatgcagcttcattagcttgagctactataacaacaacaaaacatatacaaatcatctttctatccctaaacatattcttcagtccatgccatacagaaaaaagcaagaaaattaaaaatggtagtcctaattgagcccctgcattcagccagccgttactagatgttctgttatctattgcataagctctcctttgaaagctttttgtttgaattccatatcctactataggtctttcctgaatcatccgtaataatcctaaattgtccatcattctaatactataagaagtatctctcgtttcattcttttgagcaaacttttcctgtactgcatctgaacttaacaaaactgacacacaagtaacacaaaaagcagttactataatcgcttgcccaatttttcgtttatcaagaacattaaacattacatatatacatataataccaaacgcaatataccctgctgtactttttgttaacattagagctacaataagaattatatacttctttattaaaatcatatacctatgctctttaaataaatctattatatcattactacataatattaatgtaaaattcaaaattatttgatactgtcctggttcccaaaaaattgaagctagtctattttggctcccccatcccatattgaaaatatatgccgacacggtaatgccagaagataggacatttgcataatattttcctgcaatgagttcagcccaatatagctcatttattattatcgatatcaatgacaaccactttatacacgataaaagttttctcacaaaatcatcaaatgatattgcagaaacgattaaaaatgtgcctacatagaagattatatattgataatagtaattatcgtatgcaatatttataattttttgttctattattatccatagaactataactattaatgaaattaatggccatttatttatttttcctttttgatgcttaaagaaaaaaaatcaaaatgccagaaacattattaataaaagatttattggcacatataatcctaaaattacatgagctccggacatagctattattaataaaactgctatatattgaaatatactattattttttattaaactcattatgatttcaccagcaaaaatacgttttcacaccctatacatcgttgtcaataatactcttcccttatattcttcaaaaacgacttctttacaaatgaaaccccattttggcaacacaataaaaagaatatttgatgtgttgacacatgggattacatattaaagagacttatcctttgacacttcaatatgtagttttaatcaaattcaggatacttgaagccaataaattgcatagtattttttagttttgtttcgtcatcttcagaaaaatttgcatcaactccaaagactctttttccttcataatacttcgtaaataactcttcaagttgttctcttgtaaatcgttcctctgaagaatacagttttgcttcgtgctgcaaaatttgttctatattgaatttcacagctataatacgagctggatttcctgccacgactgaatatggaggaggtgaaaaatgtttactcaatagtgtatttgccccaactatacatcctctgtgaagatgagctccccccaataaagtaacattcatccctatccacacatcttcatccacaataacgtcttctatcttatcatgaatatgagatgcacccaaacaacattgtgggattcctacagtcgaagtatgcatatcaggcactacacttaaaccaatcgatgcgacgctatacttacccattacaaatttccccttatttgataatataacactatttggatttattcgtgcatattcgtgcatataaacgttttctggatgaactatcaaaaaaggttgtgcaactatacatctatgtccttccaaaccaaattccgttgtttttgataacatttcatccctatatcctctaaatttaaaatatattcttctcacgaacattaaaataatcatccttattttatccatatcccttgagccttttgacttaaaatttttctaatttggactgtaaaaaagcagctatagataatatttattactatcatagataacacgacacctatggcacctaatcctaaatatttccctaaatacaatgataatggaatatgaaacaccaatccaatcatcgttacgtatgtctgcaattttacagttcctataccatttatcatattaacctgtaaactatcccagttatgtagcatcatataaacacaaatagtcgatgtcataagcactgtaatattggctttatctcctatccagatcgaataaatcaatggtgaaagtattgtcataattatcattaataccattgacattaagtacaacttagacatctttttataaacattattcatccatccaaaatctttttttgtatatgcatcagtgaatgccggccataatggtgctaatattatggtaaaagccatcattgcaacgctcatgtacttatatgctatattataagaagtgacatcttcagggccgctcacattacttattagtatatttgtacactgatacaacacaacacattgtatctgtatgataaaaaaacgtgctcccaagctgaatatgcttttaacatattttttatctatatacttataactaggagataccattttgaattttccgcaatataaaattacagatgcaataacaatgacaataattggcatagccgatattgcaaacgctaatgcaaccaaagaaggaaggcaaaattttgtaagtaaccaaattgctattaaagagagaacatttcctataacaggaaacactgtagataatgctactttttgaaatgcagcaattacagatgttaggacatttactatcatctgcatacaaaaaaaagcaaccaatatataaagtacacgagttatttcatcgttgtattgtacatttacattcaaaaattcagcccatttgacaaatggaatcagtagttcaaaaagaaagcatataggaataaatataaaaaacatcatagcatatgttgtactaactaatgatttccctttaccccaatctttaagtgctattgcttctgttaatttattctttaatcctaatgtgaatccaatatcgaaaaaaccaagccaaaccataacgcttgataacgtcagccaaataccatacaactcgttagaaacatatcctaatgtcattggtacaagcatcaatgatacaatgatactaaatccccttatagcaaaggagactataatatttttttttacaacaacacttctttcactgccagtaactagccttgattttatctttaacatactactctaattatataaaatgataatatgtaaatcctacaataaacagtcaataatactcacaaaaaacaaggcaagttctagacactatttccattttcctacctctcttcaaatcgccccttactaaaaccaaaaaggcctcgcagtgttctttcttacaaactcgcttgccttttcctcacccccatagatataatcgagtgcctgaaccaccagctaaaactattcctttcattctgtttatcgtatttttaaattgtaaaagcccaatgtagtcactgcttattttatttttaagcagatataattaaatatttcgtggattttttaattgggaaggttatcggacaacaagcccctaatatttgtcaccgacattaaatagataatctgctatatgaagcagatcttttgtaatgttcttgtagtaaaatcccccatgtcccctataaaaagattgattatttaatcattcaaatccccattttctgatgctggttctacacatccagccggtatgtctacacatgcacaccccaacattgtcaatcgaacagcaactttcgattttccattcaaatttactaattccccttccagtcctgccaatggtcccttgattacccgtattttttctcccggagctagcggcgatgtactcatgctgatcgtctcatccgagtagtcgagcataaacttaaatcgcaacatttgttggtcaggaataacagccggagtactctccccacgtaataccatgtaacggctgatagcagataaagttaagacttctttttgttcttgcggatcaacgtgaacgaagatcatcatcggaagtagtacccggtcgacagctttacgacggtcgctccattgatggacttcttgctgaattggaaggaaattttcgatccccattttcgtaagccgctcacttgtttttttctcgtgacaaatacgtacgactgccactaaccagcgttttgagcgtgctacgcttctgccaatcacatctgttggcagaagatttcgatcgtcatttttcttaatgatcatgtatttttacccctcatttttccattactccttaggcaatggattgaattcggtgacaaagataaataaaataataaatagtaaacaagaaaaaacgctttctttttttacacacaaatagaaatatacagttaagactatcctgaacatgaaaaatccgctatcacatgggttctattttaccacccatattttgtacaacatccctaaacaaatcaggcgcggaaattccgcgcctgatttgtttttctttgatttacttaccacttataattgataccgaagctaagcaattctttcaactggaagaagctgtctccttcagtcggtttcgagctgtcgtcaaaacgggtatgtatatagagcttagtagaaagataacggttcaatacgaagttgaatgtattttcccattctacacgtgcccaatgatagttggtcagataattgagacgagactctaaagttactgcagaaatgatggtccagttcaatgtagattgtaactgggaaccaaagtcatttttagagcattttcctttgtctaagccaaacttagtttcgtctacttcagagctaccgatataacgcaagttgtaagtcaacggtgccataaagactgaaagattaaatttcttcttgctcaatttatagtccataccgacactgaccgccaaatctgccggagacatgaaagcggaaactaattcttcgctattggctttataaccattaaagaactgggtcttgaactcggacgaaatggtataataccaattcttgaaagctctcaaacctaatttattatataaacgaaactggtcggtattgaacagatatttgtgatattcatctgacggtgtggaggtcatacccactttagcttccagctgattttcaaacaggactttttcattatcattatagttggcaaaaacctggaaagtggctaatccggagaagttactttcacctcccttataccagttatccgaaaggtggttctggctgatctgcaacgatccgttacctccggtcacccaccagttcggtcgactaatcttcatattggcctttcctacattatcatccatattttccggttggaacagatggataactgttgctttcggagatatcttcggcttcacatcatgacggaatacatcacgactcataatgcggtcttctgtagtgacaaccaagttcggacgttccaaataaagatccatcaatgcactattcactattttttcggcacgctgggtcttggtaaatgccagggtatcataaggcagaagttccgctgtcagttgaggagtggtatcccattgcataggcttccattccaatttcgaatattgtgccatcggagcataataatatgccaatggtgtgaacagacgaaaataatcgggatcagacggaatataacgtggcggcacggacaggtcgttcagataatctaattgcgcgacatacttattatataaataagaaacggtatccagtttcggagtcggccccgacatattcagtttgagcatcaaatatttctgaagctccgccgaaagcgtatctgctttcacgactctggcttttgccacaactgttgaagatttaaccgttttggctggtttaatcacttcaggagcaggctgcaaagagtcagtcggaagtgaagtgggttcgacaggttcctgcgcaaaaagcgataacgataagattgacagaataaacgctgaacataaagtagtaattctcatcatatttgtctatggtttagggtgcaaagctacattattttgtttagaaatcatagcattcttttaaaattgcattttttaataaaattgtggagacgaaagactgtaatcttcctcttttttttataattttgcggtttttaagttcgtaagaatactactaagtaaacaattattaaaacagttatagctgtgggagaaacaaagtatattttcgtcaccggtggtgttgcctcttctttaggaaaagggatcatctcatcatccatcggtaagttgctgcaagcaagaggttataatgtaaccatccagaagtttgacccgtatatcaacatcgacccgggaacattgaatccatacgagcacggagagtgctatgtaaccgtagacggacacgaagccgacctcgacttgggacactatgagcgattcctgggtatacaaacgacaaaggcgaacaacattactacgggacgtatctacaagagcgtcattgacaaggaacgtcgtggagattatctgggtaaaacgatccaggtgattcctcacatcacagacgagatcaaacggaatgttaaactgcttggtaataaatacaagtttgattttgtgattactgaaatcggtggtacggtaggtgacatcgaatcactcccctacctcgaaagtatccgtcagttaaaatgggaactcggtaagaacgctctttgcgtacacttgacctatgttccttatcttgctgctgccggagaattgaaaacaaaaccgacgcaacattctgtaaaggaactccaaagtgtaggtattcagccggatgtactggtactgcgtgccgagcatccgctaagtgacggattgcgtaagaaagtggcacaattctgtaatgtagacgataaagccgttgtgcaatctattgatgcggaaacaatttacgaagtacctatcctgatgcaagcacaagggttggacagcactatcctcgaaaagatgggactgccggtaggagaaactccgggactcggcccatggcgtaaattcctggaacgtcgtcacgctgcagagacaaaagaaccgatcaatattgcactggttggaaaatacgatttgcaggacgcttacaagtctatccgtgaagctttatcgcaagcgggtacttacaatgaccgcaaagtggaagttcatttcgtaaacagcgagaagctgacagatgagaatgtagctgaagctttgaaaggtatggcgggcgtaatgattggtccgggattcggtcaacgaggtatcgacggcaagtttgtcgctatcaaatatacacgtacacatgacatcccgactttcggtatttgtctgggtatgcaatgtattgctattgagtttgcccgcaacgtactgggatacactgatgccaactcacgcgaaatggatgaaaaaactccgcacaacgtgattgatatcatggaagaacagaaggcaatcaccaacatgggtggtacgatgcgcctgggcgcttacgaatgtgtattgcagaaaggttcgaaagcatatcaggcttacggacaggaacatattcaggaacgtcaccgccatcgctatgagttcaacaatgattataaagaccgatatgaagctgccggcatgaaatgtgtaggtatcaaccctgaatcggatctggtagaaatcgttgaaattccgactttgaaatggtttgtcggtacacagttccatccggaatatggcagtacggtactgaaccctcatccgttgttcgttgcatttgtgaaagctgccatcgaaaacgaaaaagcaacggtgaacggctaacgatacgtggtaaacaaccggtagtttgtaatttatataatttgtaattaaaataagaatggataaaaacaccatcacaggtctcgttctgataggtatattattggtaggattcagttttttgagccgtccaagcgaggaacagatagctgcgcaaaagaaatactacgattctattgccgtggtacagcagcaggaggaagcgttgaaggctaaaacggaagctgcactggctaacagtcaaaaagaggtggcatcggctgccgattcttctgctttgtttttcaatgccttgcatggaaccgactctaaaatcagcatccagaataatgtagcggaaatcactttcacaaccaaaggcggacgtgtctattcagccatgctgaaagattatatggcacaagacaaaaagacgccggtcatgttgttcgacggtgacgatgcttcgatgaacttcaacttttacaacaaggcaggagccatccagaccaaagattatttctttgaagctgtgaacaagacggacagtagtgttacaatgcgcctggctgcggatagcgcaagctatatcgatttcatctatacgctgaaaccggatagctacctgatgaactttgaaatcaaagcgacaggcatggaagacaagttggctagtactaagtatgtggacatcgactggtcacaacgtgcccgccaactggaaaaaggattcacttatgagaatcgtctgtcggaactgacttataaagtaacaggtgacaatgtagacaacttgtctgctgccaaagatgacagtcaggatttgccgggacgcattgattgggtagctttcaagaatcagttcttctcgtctgtatttatcgctgaacaggatttcgacaaggtttccgttaagtcaagaatggaacaacagggaagcggatatatcaaagattattctgctgaaatgaatactttctttgatccgtcaggcaaggaaccgacagagatgtacttctacttcggtccgaaccacttcaagacgctgaaagcgctggataaaggacgtgacgagaaatgggagcttcaccgactggtttacctaggttggccgttgattcgctggattaaccagtttatcacgatcaacgtattcgactggttgtccggttggggattgagcatgggtatcgttctgttgattctgactattatggtgaaagtgctggtttatccggctacctggaaaacgtacatgtcttctgccaagatgcgtgtattaaaaccgaaaattgacgaaatcagcaagaaatatcccaagcaggaagatgcaatgaagaaacagcaggaggtgatgagcctttacagccaatacggggtaagcccgatgggtggctgtctgccgatgttattgcagttccctatcctgatggctttgtttatgttcgtgccgagtgctatcgaactgcgtcaacagagtttcttgtgggcggacgacctttctacttatgacgctatcatcacattcccgttccatatcccgttccttggcaatcaccttagcttgttctgcttgctgatgacgttgacaaacatcttgaacacaaagtacacaatgtctatgcaggataccggagcgcagccacaaatggcggctatgaaatggatgatgtatctgatgccgattatgttcttgttcgtcttgaacgattatccgtcaggtttgaactattactacttcgtgtcaacgctgattagtgtgggtactatgattctgcttcgtagaacgactgacgaaactaaattgttggctattcttgaagcgaaaaagaaagacccgaaacaaatgaaaaagaccggatttgctgctcgcctggaggcgatgcaaaagcaacaagagcaattgcagcagcaaagacagaataaaaaataaggagtaattcctgaatcatattctaagaaagccggacatcctattttggttgcccggctttctttctctaaaaaataaaataagatgaaaactaaatattcttataaacaaatctggacaatctcctaccctatcctaatcagtctgattatggaacagatgattggtatgacggacactgcttttctgggacgtgtcggagaaatcgaattaggtgcttccgccattgcaggtgtatattaccttgccattttcatgatggcattcggtttcagcatcggtgcccagatattaattgcgcgtcgcaatggagaaggaaactacaaggaaatcggacccattttttatcagggcatatatttcctgcttgccatggcagtgattttattcacgttctccatcgtattctcaccatatatcctcaagaatatcatttcgtctcctcacatttacgatgcagccgagagttatattcattggcgtgtgtacgggttcttcttctcttttatcatggtcatgttccgcgccttctttgtaggtacgacacaaaccaagacgctgactttgaactctattgtgatggtactttcgaatgtggtattcaattatatcctgattttcggtaaattcggtttcccgcaattgggaattgccggtgctgctatcggctcttcgctggctgaaatggtatcggtgattttctttatcatctatacctggaagcggattgactgcaggaagtatgcattgaatatactgcctaagttccaagggaaaacactgaaacgaatactgaatgtttctgtgtggacaatgattcagaactttgtttctttgtctacctggtttatgttctttctatttgtggagcatttgggagaacggtctttggcaatcgcgaacattatccgaaacgtatcgggaatcccgtttatgattgcaatggcatttgcatccacctgtggttcattggtcagcaatctgatcggtgcaggtgaacaggattgtgtacggggtactatcaggcagcacattcgcattggatatatatttgtattgccaattctgatattcttctgtctatttccggatctgatcctacgtatttatacagatatgccggatttgagagcagcatccgtgccttcactgtgggtattgtgttctgcctatctggtgctggtgcctgccaatgtttatttccaatcagtatcaggtacagggaatacgcggactgcactggctatggaactttgtgtattggctatctacgtcacatactctgcatatttcatcatgtacctgcggatggacgtcgcatttgcctggacaacggaatgcgtatatggtattttcacgctgatgttctgctactggtatatgaagaaaggaaactggcagaaaaagaagatttaaatccttttttcactatcttcgcaagaaaataaacattttataaaatatatgagacaagctaatttaattatgatgtcggcagcaatgttgttagctgcctgcggaggaaccaaagacgcaggcaagacagatcaggtgcttatcgagaaatcggatattaagatcgaagggaagcgcatgactcccgaagcactttgggctatgggacgtatcggcggattcgccgtatcgcccgacggaaagaaaattgcgtatacggtagcgtattacagcgtaccggaaaacaaaagtaaccgcgaagttttcgtaatgaacgcagatggaagcgaaaatcaacaaatcactcataccccgtatcaggaaaatgaggtgacttggattaagggaggcaccaaactggcattcttaagtaatgacaacggaagcagccagctttatgaaatgaatccggatggtagcgggcgcaagcagctgaccaactacgacggagatattgaaggatattccatctcaccggatggcaaaaaactgctgtttatttcacaagtaaagacgaaagaaagcactgctgataagtatccggacctgccgaaagctaccggtatcatcgttaccgacctgatgtacaaacattgggatgaatgggtgacaaccgctccgcatccttttgttgccgactttgatggtaacggcatttccaatattgtggatattctgaacgacgaaccgtatgaaagtccgatgaagccttggggtggcattgagcaacttgcctggaatatgacttcggacaaagtggcttacacttgccgtaaaaagacaggactggaatatgcgatttctaccaactctgatatttatatctatgacttgaatactaagaaaacagaaaatattactgaagagaacaaaggatatgataccaacccgcaatactcaccggacggcaagtatattgcctggcagagcatggaacgtgacggatacgaagctgatctgaaccgtctgttcatcatgaacctggaaactggcgagaagcgttttgtgagtaaggcattcgaatcgaatgtggatgcttttgtctggggagcagatgctaaagtgatctatttcacaggtgtatggcatggagaatcacaaatttatgcgcttgacctggcaaatgattcggtaaaggctattacttcaggaatgtatgattacgaaggggtagctcttttcggagataagctgattgcgaaacgtcattcaatgagtatgggtgatgagatttactctgtggcactggatggttctaccactcaactgacacaggagaacaaacaaatctatgaccagttggaaatgggtaaagtggaaggtcgctggatgaaaacaacagatggtaaacagatgttgacatgggtgatttatcctccacagtttgatccgaacaagaaatatccgactttactgttctgcgaaggaggtccgcagagtccggtaagccagttctggtcttatcgctggaacttccagattatggcagctaatgattatatcatcgttgctccgaaccgtcgcggtttgccgggattcggtgtggaatggaacgaacagattagcggcgattacggtggccagtgtatgaaggattacttcactgctatcgatgaaatggcaaaagagccgtatgtggacaaagatcgtctgggatgcgtaggtgccagcttcggaggattctccgtatattggttggccggacatcacgacaaacggttcaaagcgttcattgctcatgatggtatcttcaacatggaaatgcaatatctggaaactgaagaaaaatggtttgccaactgggatatgggaggcgcatactgggaaaaacagaatccggtggcacagcgtacgtttgccaactctcctcacctattcgtagagaaatgggatactcctattctctgtatccatggagaaaaagactaccgtatcctggctaatcaggctatggctgcttttgatgctgccgtgatgcgtggtgttcctgcagagctgctgatttatccggatgaaaaccactgggtattgaagccacagaatggagtgttatggcagcgcacattctttgaatggttggacaaatgggtgaagaaagctccgtctaaataaaattttacgttaattacatagtagaataaacatagtaaactaaaagaagcccctgttctcaatcttttgagttcaggggcttctccattgcattcatcaaaatcggctaaaattataaaaaagttcgctaaatttactccgaataaatattttcaatttctacaatatacatcttatggaaacctccatgagcaccaccgtaccacttttctattgattctttatccagaaaacattccggtttgatagtgtcagcataaagtttcttacattccagactcaaacgtgcctgctcgaacaggacatttcctttttctgtaaatacaggtttcaatccggtttcttttactttatctatattacgtcccgacttggaaccacaaacagcgtgaattttcttattttcttctcctaagaaagaaagtgtcaggtaatcgttcttctctacaaactcgtatgtataccgttcgggacggataaaaacgaaagcaaccggtttattccacaaccagccgataccaccccaacttgctgtcatcgtgttaaacttttcttttgttccggctgtaactagcatccactcttttccaatcgcttcgaaaaagttttctttcaaatcttttacttctaatttcttcatctctttattcgtaaatatgtattcataattagtttatataataatttaggtacggattacacagattaacacggttactttgcaacaataacaacactaaaaaccgtgaaatccgtacctagaaaaataacgattaattcatggcaggtacttatctaattatttctgtttattcaatttcacaatctctcccaaatagggaatcttcaccggaatcttccgtttcttagcctctgttgcgaagactttcgggggatcatgcaaaggctcgtcagacaaatcgaatgtgccataatgcatgggaatgataagaccagcatgcatttcctcggcggcagtcaatgattcgtaaggcgatatatgattgggacgcataaaccagcgaggtttgtatgccccgatgcctaacaaagcataatccggtgctccgaacagatcgggaatctcacggaagtgactggaataacctgtatcaccgctataataaagagaaattccatttccttgcagcatgaaagctccccacagtcgctggccaccatcacgtacggaacgtttgctccagtgttgtgccggtagaaaagtaatcttcaatccctcatcttccatttgttgataccatccggcctcaatcactttcatttcgggaaaccatccctgaatcagctcaccggttcccaagccgcaaaagagtttcatttgcgggttattcttcagtaaacgggctatactctgtttatccaaatgatcgaaatggtcatggctgacaagtagataatcaatccccgtaaatatgtcaggattagcgggaaactcgctctgtctcttcacaaaaggaatactgccgaacacaggatcgaacatgattcgtttacctgctaactggagaaagaaagaattatgtccgagccatatcagggaatctcccaccactgcatccaatgaacggagataacaaacctttggatcccatttcaccgttttcttctctttgcgttggggattggacgaaagacgccatttcagtacactccccatccccggacggaagcgatgctgccgattaaaaaaacgcccgcgcaccatcggatttcctctccaataagggttgactgtcgctaaacgttcgtttctcctaaagcatatatgttcacccatttttatttcctgaatacgtatttacaaacttactaaaaatttctcgatttacgatgaattagagtaaacaaaaaatgtaccccggacacactatcggggtacatttacttataaaggaataaatattatccttttttaatagaatgagacttcgttaagagcagtgcaagccatacaaaggcagttgccagccaagagctgaaagattaataatcattatgactgcacccaatatccatagaatcaatagcgaccatttcaaacccgttcccatcggtgaccaatggaataattgccgcaagatagtatacaagaaagctcctaacggaatgccgatgagggcaactccggcaatcgtacctagcagtgtcatcattggagatacggaagcaaccggcatccagtcgatggcaggcagcatctcgtaaagcagtgctcctccgctaactgccacggcaattgctgcaaacaccagtgctaccagtacaacggccagtacgaacaagacagggcagcagagaatgacaagagctaccagaaatattttaaagagaacagcagcaatggaaacaaatacatcgcctatcttttgaagaaaggtacgaggtttgccggagttcatatagttgttaactccgtccgctacacgttcgaaaccgtctgtcactgttttgccaatattctcaatggtcactgcttctccacgcatactcaatttttccgcggcagtacgggcttccggaataacgatccatccgataatataaagtataatcatcgggcaataaggtacaaatacaaggataatcatcaatatacgcactaatgtgatgtcccaaccgaagtaagctgccaatcctgccgctacgcctcccaacaatttattatccggatcacgaaaccagcggcgttgagcagcggtttgcgtactgccttgattagcggacgatgtttgttccgttcttttctgtgagtccatatcctcatcagcaattccaaagtcttccggtttgccgacacgagcgataatttcttctacatccgaaactgtgatgacctgttttccttcagttactttctctgcaaacagttcggcaatacgcatctcaatatcgtttacgatctcttccgcaccctcctgtttacgaaagtaatgcttcaaattagacagataattatctaacagtcggtaggcatcgtcatctatatgatagacaattcctcctaaatttatggtcaatgtctttttcatttttatttcttctttttcggattatctattggctatatgattcactgtatcgttaagttctttccaggaaatttccagctctcccaaaaagacttctccttgttcagtgagtttatagtatttgcggggaggtccctgggtagattctacccactcataacttaacaggtcatcatttttcagacgggtaagcaatggatacaaggtgccttccactacaatcagttgggcttctttcaatttctgaataatatcagaagcataagcgggctccttgtgcaacaaaagcatgatacaatattcaagcatgcctttcctcatctgtgattttacattgtctactttcattattcacttcttttagatgcacaaatatatgcattactttagtaccttgcattacaaagtactataaattaataataattaaaacattagagactctccaccttattataaaaagaaataatggctatatttgtgcccgttaaaccaagaaatagaaaatacatatgtttacaattcgaaaagcaacggtagccgattgcgagcttattcataagatggcaaaggaggtattccccgccacctacaaggaaattttatctcccgaacaactggattatatgatggactggatgtatgcaccttccaatgtgcgcaaacaaatggaggaagagggacatgtgtactccattgcttataaagagaatgaaccatgcggatacgtttccattcaacaacaggaaaaggatgtattccatcttcagaagatatatgtcctcccccgttttcagggcacgcattgcggcagttttttattcaaggaagcaatcaagtgtatcaaagaaatacacccggaaccttgtttgatggagctcaacgtaaatcgtaataataaggctttgcagttttacgagcacatgggaatgagaaagttgcgggaaggtgatttcccgattggtaacgggtattatatgaatgattatattatgggactggatatttgatatacaaacaaaatgcctcggaacatttatgatacttgttccggggcattttgtttatttagttaatggcaagattttatttcgctacacgttccagccattttaacatgaaaatcattgtaaacattgaaatcgtacaagctacaacaaacacagtccatgtcatccaaataggaattgattcgtacaggatagcaccaatcactagcaactgattacccagtgctgttgctcccagccatcctccttgcataataccttgatatttaggaggagcaaccttagatacaaatgaaattcccaatggagagatatacagttcagctactgttaagatcagataggtcagcatcaataaaaatggagtaactttcactggtgaagttccaacagctacaatatcctcatgcaacggcaaattagcaaaataagatccgactgccattacaataaatgccaatgcagcaattcccataccgatggcaatctttttaggagtcgaaggctctttaccacgtctacgctgacttgcaaaaatagccataatcaccggagtcaggaacactacaaaaaatggatttaacgattggaagagctctgctgaaataggcataccaaacagattcaagtcagtatattctttcgcaaaataagtcaaagtcagaccattttgatggaatgaaaaccaaaagaaaataacaacaccaaatacagcaaacagagcatacatacgttgttttacttcctgtgcactcatttctacaactgtagaagatgctgaagaagcaacggtctttttgctgggatccgggaagtttttcttattcaaccaataaatggttaaagaaatagccatagcaataatagctaccccgaatgcgtaatggaatccagtagtaaagacattcaaataatctgaagcgaaagccgtatagtcttgtacaggagcagtagaagctttggtaactaaggtatgataagtttcagtagcttcaggcgacaaagtacctgctaattgaccatggcacaaagcaggaagatcagcatcataattataaccgaaagtagataaccaccagttacgcacgcctacagctgcaaacggagcaaaaatagcaccgatattaataaacatataaaataaagagaaaccggagtcacgcatgttggcatattgaggattatcgtacatctgtcctaccaatgcctgcaaatttcctttaaataatccgtttccaaatgcaataacaaacaaactagcacaagtaataaccagatagagcatcttgttatctaccggagtcttagatggaatagccaataataaataaccaactgccattaacacaattcctgtgaaaatagttcctttgtagttcctcgttttatcggcaataatacctccgaccaacgccaaaatataaatagaaaaataaaaagttgagtaaataaatcctgcttcttttccattcattccaaacttggcttgcaagaaaagcacaaggatagccatcatagtataaaagccaaaacgctcacctagattggctaaagcggctgctatcagtcctttagggtgtttgttaaacatagaatataaattattaaattaatgatttaatggtcgataccacatatattttgcaaatatatactttttctcgagtttttgcacaatgatttgttaaactactcctcaaataaacgacaaatttccgccctggattcacgaatcaaatcttccggagctatttttatctgaagtccccgtacaccggcacttacataaatatacggaaattgttggctggtttcatgaatataagtaggaaaatgctttttcataccgatcggcgaacaacctccccggatatatccggtaagtggcagaagttcttttacgggaatcaactcgcacttcttgttacccgaagctttagctgccagtttcaaatcaacttcatgttctcccggaatgacacagacaaaatatccgcttttatcgccgtgcagaacaagcgttttaaagacctgctcgatattctctcctaaacttgctgccacatgaacagcactcaagtcgttttcatctacttcgtagggaattaattcataggctatcttagctttatctaacagccgtgcggcatttgttttattgattttcattttcgttgtatttataagttctatatctgataaataaagaatatgatatgataagtgccaactcatcgaagattgtccgataagttggcactctatgatttaaattagagacccagctcttcgcgaagaaacttaggtgtatatcctttagggctcttcgcaacttcttccggtgttccgtaactaaggagttctcccccgcccttaccaccttcagggcccatatcgataatataatccgccattttaatcacatccagattgtgctcgatgacgataacagtattacctttatctacaagcttattcaatactcccatcaatacacggatatcttcaaaatgaagtccggtagtcggttcgtcaaggatataaagagttttgcccgtatctcttttcgatagctccgttgccagtttcacacgctggctttctccaccggaaagagtggtagaagattgccccagttttatatatccgagtccgacatcctgcaagactttaatcttattcaagatttgcggcacattttcaaagaattccacagcacggttgatcgtcatgtcaagtacatcggcaattgattttcccttgaaacgtacttccagtgtttcccggttataacgtttaccgtgacaaacctcacaaggcacatatacatcaggaaggaaattcatttcaatcgtcttataaccatttcccgtacatgcttcacaacgcccacctgcaacattaaaggagaaacgtcccggtttataaccacgaatcttagcttccggcagacccacaaacaggttacggatatcagaaaacacaccggtataagtcgcaggattggagcgtggcgtacgtcccaaaggtgattgatccacatctactaccttatctatattttccaacccttcaatcgaatcatattccaaaggatcttgcaaagaacgatagaacttctgtgaaagaatcggttgcaaagtttcattaatcaaggtggattttccacttcctgacacaccagttacgcaaatcagtttacctaacggaaattcaacatctacattcttcaggttattccccttcgctcctttcagccagatagatttcccatttccttttctacgcttggcagggatttctatcttcatcttgccattcagatattgcgaagtcattgtatctgtattcagcatctcctgcggggttccggcgaaaacgacttcgcctccgagacgtccggctttcggacccatatcgatgacataatcggcagccagcatcatatccttatcatgttccactacaatcacggagttccccatgtcgcggagttctttcaacgagttgataagacgcagattatcacgctgatgcagaccgatactcggctcgtcgagaatataaagtacattcactaattgcgaaccaatctgtgtagccaagcggatacgctgactctcaccaccggaaagactaacagagctacgattcaatgccagataatccagacccacgtccagcaagaacttcaaacgtgtgcgaatctctttcagaatctccaccgatattttcttctgcttatcggacaggaactcatccaccttcatcaaccagtcgtacaactcgttgatgtccatattcgccaactcattgatattcttatcatggatacgaaaatgcaaagcttctttattcaaacgagcccctttacattcgggacaaaccgttgttttggcaaattgttccgcccatttctgtgctgttgcagaagcatccttttcctgcaacatctgaatatacttcaccactccttcgtaagtaacaaagtaatcggaggaagtaccgatcagcgaactcttgattttaatccgttcatcagaaccgtacaagacttcatcaatcgcatcgtccggtaactcctttatcggagttttcagtgttgcgtcgtacttctcgagcaaagcaccgatttgccagaaaatcatcgcattcttatattttcccaaaggtgctatcgctccttcataaatggaaagttcacgatcgggaatcactttgtccacatcaatctgattgactactcccaatcccttacacttcggacatgctccttgcggtgaattgaatgagaagttatgcggagccggttcacgataagacaatccggtgacgggacacatgagccgcttactataatgacggatactttcagattgggcatccagaatcatcatcaacccatctccctggcgcatagcggttgccacactctgtttcaagcgccggtcatctttctccgctaccactaatttatcaataaccacttctacatcgtgatttttatagcggtcgagtttcataccatgcgtgatttcacgcacttctccgtccacccgcacatacaggtatccttttttacgtatttgttcgaaaagttccctgtaatgtcccttacgtgaacgaactagcggagccagcagatatattttctttcctttataatctttcagaatcaagtccagaatctgctcttcggtatatttcaccatctcctcacccgacagatacgaataagccactcccgcacgggcatacagcaaacggagataatcatatatctccgtagtcgttcctacggtagaacggggatttgtattcgttgttttctgttcaatggagataaccggactcaaacctgttatcttatcgacatccggacgttccagattgcccaagaagttacgggcatacgctgaaaaagtttcgatataacgacgctgtccttcggcaaaaatcgtatcgaaggctaaagaagattttccactaccgctcaatccggtgataacagtcaaactgttacggggaatttcggcatcaatatcctttaaattgtgcacgcgcgcaccgtacacattaatatattctgtttcctgcatattcatatccttccataaatgttgcaaaattaatgtttccgcccgaaatatgctcctaaaaaagcacaatattattttcttaactcaaatcttatgaagatatagggcattatttgtacctttgttccttgatttcaagaaccaatagttataatttgatgaaaccgataaaccgtatattcttatttttgctttttataagcgtttcatatgctatcagttatgcacaagaaaaccaatcatatttcttgcataccatcgaaaaaggacaaagtttatactccatctccaagatgtataatgtcactacatcagacattatacgtctgaatccgggctgtgacgaaaagatctatgccggacagacaatcaaaattcctacgggaaaagagagtcagaagggagaaacattccatacgattcaagccggagaaacactatacaaactgacaaccatgtataatgtatccgccaaagatatttgtgaagcaaaccccggtttgagtgccgaaaatttccgcatcggacaggtcatcctgattccgcagaaaaaagaagagcaaactgctactgcaactcaaacgcctaccgaacagaccaccattcaaggtcctgttgtgccgaaatgcaaggatatgcataaggtaaaacgcaaagagactatttttagcgtgagccgtgaatatggaatcagcgagcaggagttaattgcagctaacccggaactgaaaaaaggcatgaaaaagggacaattcctttgcatcccttacccggcagcaacgaccgtgcaacctacacagaaggaagatccttacgctattcctcccagcaatagcgagcttttccgcaaaagtaaagagactccccaaaagctgtctaccattaaagcagctttattgttgcctttccaggaagacaaacgcatggtggaatattacgaaggtttcctgatggcagtagacagtctgaagcgtacaggtatttctcttgatctatatgtatatgattgcggaaaagaggtttctacattaaatacgattcttgccaagaacgagatgaaaagtatgaatatcatcttcggtccgatgcatcagaatcaaataaagccattgtccgacttcgcagagaagaacgacatacgcctggtgattcctttctctcaaaaaggagaagaggtattcaacaacccagctgtttatcagatcaatacgcctcaatcttacttatattcagaagtttacgagcacttcacccgtcaatttcccaatgcaaacgttatcttcatagaaccggcgagcgttgataaggagaaagcggaatttatcagcggcttgaaacaagagttgaaaagtaaaggaattccaatgagaaacgtcagtgaaagcgcaacgaaagaaacgttgaaagcagcgctccgcagtgataaagaaaacatctttattccgacatcaggcaacaacgtcttactaattaagatacttcctcaactgacgctgttagtcagagagaatcctgcagagaatattcatctgttcggctatccggaatggcagacctataccagagatcatctggaaaacttctttgaattggatgtatatttctattcttcattctatacgaatacgttgttcccggcagctgtgcagtttaccaatgcttaccataaatggtatagcaaagatttggcaagcaaataccctaattacgcaatgctgggttttgacaccggcttcttcttcctgaaaggattatcgctttatggctcggaactggaaaacaatctgcctaaaatgaacctgactcctatccagaccggattcaaattcgagcgtgtaaacaactggggaggatttattaataaaaaggtgttcttcatacgtttcactaagaattttgaattagtaaaacttgacttcgaataatacgaaaatgataaagataaaaccatttttgatcgcaacactcctacttacaggatttgcccttcctgctgtcgctcaaatcggagaagcacgaaacaatttatcggtaggtatcaatggaggtgtcaatttaaacagtgcttcttttactcccaccatcaagcaaaatagcctgatgggaattaccggaggtttgacagcacgttatatatccgagaagtattttgccatgatttgtggcgcacaggtcgagttgaatgtctcgcaacgaggctgggaccaattatttgaaacaatatcactggacgccaacggatatgaagtcacttcgaaggaccctactaaaacttacacccgcaaaatgacttatatagatattcctttcctcgctcacctcgctttcggacgagacagaggattgcaattctttgtccatgcaggtcctcaaatcagctttctaatcagtgaatcggaaacaataaaaggtattgatatgaatagcttatctgatacacagaaagccctgtacggagttaagattcaaaataaatttgactatggtattgccggtggtggtggtgtagaacttagaacaaagaaagctggtagcttcatcgttgaaggccgttattactttgccctgtctgatttctacagcactactaagaaagattatttcgcccgtgcagcgcatggaaccattaccataaagctcacatatttatttgatttgaagaaataacccctctttcaaggaggaagagattaaaacctcttatttaaagatctcattcacaacgaactaaaaaaaatccccactaactctaaacgaattagcggggatttctatttctgggggctttagccctttttatcgcaatctatccgcagcttttaccatcacctcatcccgtccgatagcacggataaccagtatgttcaggatgatagaaacaagcggcaaacacaatgcccagcctatacggaacatattttcatcattcttcaatgcaaaataaaaagcaagggcagcaatgtaataacctaccaataataagctattgaaaattgtcatacgaatctgcagcatacggttcttatacaaaaagatagtagccacagccacgatggtgctaaccatcagaattccgaataagccccatgtagactgaatagcaccgtttacttccaatcctaatgccttaaaaggatgttctcccatcgcatcaatgaagtagcccatcggcaaacacatggctgtaatcagcaatcctacaacaatcaataaataaacagtttgaattcgttgaatcataagtattctaaatagtagttgagttaaacaataatagccaagcaataaggagcagggatcatcatcccacttactacttgactatcaaattcttcgtcagaaaataaattactgaagtttttctttctccttagccggatttctataatatattttcccttcgatgtattcttgcgtagcaatcaagtccggtttcggcaatttctcataataacgagaaatttcgatttgctctctattttcaaacacttcttccaaattgtcattgtaagaagcaaactctgccagtttcttagaaagatcgtttttgatttctacactgatctgattagcacgcttaccaataatggcaactgtttcataaacattacctgtatcagcacagagttccatcatgtcacgggttactgttgtagcaggagcattcgtttttttgtagtccataaatctatttaaatttagtctttaattactttctgtgattcattgaatatcttctcggcttctttcaaatatttactttcaggaaattcattcttaaaagcgtaatattcatcaatcgtttcgcggtaacgatccatcttcttgtcttcaacgctatagatagccatttcgtgtcttgcacgcagaaccaaaatggaaagttcttcacgataatcagtataaggataatccttcaatgcattttgagctgtgattacacaagactcatagttattgcctaaataattacccagattataatatagccttgctgaataaagctctttcaaaaccagcttatcctgtaaagcaaaaatcatatcctgtgcttcctgcttttttgtgctgttcgggaaatactccatgaacatctgcaactgctggatagcctgataagtgcttgactgatccaaacgtggttccggagtatccaggaataaagccttacctgcatggaaacgtgccaattcggtgaaagtaccacgaggatatgtattgaaataggtgataaatgtctgggcagctgtctgataatctttctgattatagtagctcattcccaacatatacaaagattcttccgctttatcggttcctttcagaatggttatcaactcattcagcaacgtagctgaacgattatactgccccttcgcaaaatagtttttggcggcttcgtacttgtattcgtaatcggtgcttttcagcaatttattatactccccacatgatgtaagagtagccgccgcaagcaaagttataatgatatttttcttcatcctatttaaaaataatgcgcaaagttacttattcgctgggaatttagcaattaatctgtgttttttaatacataaaaggcgttaaacatcgacaaaaggagagaaaatgacgtcgaattacaaacgacaaactataaacagcagattataaacgaatcacaatagtgacagtatgtgttcgggatagtaacggtatcgttggcatataccgtcgctatcttcaccggatagcgtcactatatttatagtaaaaacggtaagcaattgcgttgtccttgaattggataacacaactgtttaccgttcattatttattgctcactgttatatttacagtttatacaaatcacttgcagccagtaaatcgactttcttttctttcaatacctcgatacatttatccaggttgctggggcgaatcactacatttgcaatatggttattggcaaacgaatacatatattcaataaatacaccctcttctgataaatatcccagcacttttgccaaagcacccggcacattgggacagcttatacctactacatcagtcacattcactgcaaaatgattatcttttaaagctttgtatgctctatccggatcggatacaattccacgcaaaataccaaaatcagcattttcggcaatgcacaaggcagaaagattgatattttctttcgccagcacttcagtcacttccgtcaaacggcctgacttattttccaaaaaaatagaaagttgttttgctaccatatttattaaagtattaagtaataagtattaagtattaggtaacaagcattaggtattaggtaacaagtattaccgtagttccaagatcacccgcatggtcaatacttaatacttaatacttaatacctaatacttatttacatttttctgttatcaattacacgtttcgctttacctacgctgcgttcaatgctgcgaggctctaccagtttcacgttgactcccagtccgagtacgctttgcaaacgtcctcccagtttcttcttcaaagccagcattttgttgatctcatccgaatagaattccggacgtacttcaacctggagttccattgtatcggtattgttttcacgacctactatcaacaaataatgcggttcaaactcttccatttcaagaatgactgattcaatctgcgtcgggaatacattcacaccgcggataatcaacatatcatcactacgtcccaaaatacgatccatacgtaccaatgtacggccacaggaacatttatcatgatgcaaggccgtcaaatcacgcgtacggtaacgaagcaacggcataccctctttggttaaatgagtaaataccagttcgcccgtttgaccggattccaccggttgcaatgtattcgggtcgatgatttccgggaagtaatggtcttcattcaagtgagtcccgtgctgacattcgcactcgtacccgacacccggtccggcaatctcactcaatccataaatatcgtatgctttgattcccagcttttcttctatctcatgacgcatattttccgtccagggttctgcaccgaaagcaccaactttcagtcggaattcttcacgtggcaaaccggaatctttgattgcatctgccagataaagcgcataggaaggagtacaacaaagcactgtcgatccgaaatcgtgcatcaaggttatctgtttttccgtgttaccactggacatcggaataacagaagcaccgatattttcggctcctgcatgtgctcccaatccgcccgtgaacagtccgtatccataagatacctgaaaaacatcagaacgccccgctccataagcggtaaaagcacgtgatatacattccgcccatgtagacaagtccttacgggtatatccgacaaccgtcggttttccggttgttccggaagaagcatgaatacgtacaatttggctcatcggcacggcacaaagtccgaacggataattatctcttaaatcatgtttcgtggtaaacggcagttttacaatatcatcaatactattgatgtcatcgggagtaatccccatttcctgcatcttctttcgatagaaaggcgtgttgtgataaacgtaatctacaattttcttgagtcgtatgctttgaatcttgcgaagactttcgcggtccatacactcaatgctctcattccaaatcatgtgtttctggtattactagttgtatgaatctgttttttgatattaatatgttgcaaagtaaaggatttatttggaaaaatgatttgttatctcgattattttaccgaatattgctccactttttaggatttaactatgaattatgaactaacatcagcttataaacctaccggagatcagccggaagctatagcacaacttactgaaggggtacttcagggagttcccgcacagactttattgggagtgaccgggtcgggaaaaacatttaccattgccaatgtgatcgccaatatcaataaacccacgttgattttgagccataacaaaacactggctgcccagctctatagtgagtttaaaggatttttccccaataatgcggtagaatattacgtttcttactatgattattaccagccggaagcttatctgccgaacagtgatacatatatagagaaggatctcgccatcaatgacgaaatcgacaagctccgactctctgccacttccgccctactctccggaagaaaagacgtggtagtggtttcttccgtatcttgtatctacggtatgggaaatccttcggacttctacaaaaatgtcatcgaaatagaacggggacggatgatagaccgcaatgtgtttctacgtcgtttggtagacagtttgtatgtccgcaatgatatcgacttgaaccgtggaaatttccgggtcaagggcgacacagtggatatttatctggcttataccgacaacctgctccgtgtcaccttttggggggatgagattgacggcatcgaagaggtagatcctatcacaggagtcactatcgcaccatttgacgcctataagatttatccggccaacctgttcatgactaccaaagaggctactctccgtgctattcatgaaatagaggatgatctaaccaagcaagtagctttcttcgaatctatcggcaaagaatacgaggccaaacgattgtatgagcgagtaacttacgatatggaaatgatccgggaattgggacattgttccggaattgagaattattcccgttattttgacggccgtgctgccggtacccgcccctattgtttgctcgatttctttccggatgatttcctgatcgttatcgacgaaagccacgtaagcgtaccccaaatccgtgcaatgtatggaggagaccgtgcgcgaaaaatcaatcttgtggaatatggttttcgattgcctgccgctatggacaaccgtccgttgaaatttgaagagtttcaggagatggcaaaacaagtaatctacgtcagtgctacaccggcggattatgaattgattcagtcggaaggaattgtcgtggaacaggtgattcgtcctaccggtctgcttgatcctatcatcgaagtacgtccgagtctcaatcagattgacgatttaatggaagaaatccagctccgtattgaaaaggaagaacgcgtactcgtcactacactaaccaaacgaatggcagaagaactggcagaatatcttcttaataataatgtgagatgtacctatatccatagtgatgtcgacacactggaacgtgtaaagattatggatgatctccgtcaaggagtttatgacgtacttatcggggtcaacctgcttcgtgagggtctcgaccttccggaagtgtctctcgtcgctattctcgatgcagacaaagaaggattcctccgctcccaccgttcgttgacacaaactgcgggacgtgccgcgcgtaatgtgaacggtaaggtaatcatgtatgctgataagatgacggatagtatgaaactgacgattgatgaaacgaaccgtcgccgcgaaaagcagttggcatacaatgaggcaaacggaattaccccgcaacagattaaaaaggccagaaacttgtctgtattcggtaatgcaaaagaggcagatgagctgttgaaagaaagacatgcttatgtagaaccttctactccgaatatcgcagcagatccgatagtgcagtatatgagtaaagcgcagatggaaaagagtatcgagcgtacccgcaaactgatgcaggaagcagccaagaaacttgaatttatcgaagccgcacaatatcgtgacgaattattgaaactggaggacttgatgaaagagaaatggggataaaatttccccattgttcacctattatagcctgattgttaagggctgaaactcttaacaaacctgtaacttcgcatttagtctattaattagtgttataaaaacaccaattaagggctgataatttgcaaagttaccggaatcccgtatctttgcactgtgtttttcatagtattagatttaaggttaacaaaggttggagcaaggcgttgctcctttttttatgtctatacgtcaccttcaatgaaaaatataaaattgaaaagacataatgcaccactctctaaagcataaattaaggaggattgcagatatagactgatcgttcattacgactgaatctattcatgcaatcctcccatttcttatagttggattattcctacttcaagcgatgataaatcaaagagccttctctatggcatttttaatcaacggttccataatatcatacccttcgctcgttgggtgaactccatctttagtatattgaggattcaaggcctgattttcgtcaaccaccattgccttgtaataattaacaaacggaattttatttgctcttgcataagcctctatccggtcatttaaagatttaattttctgcggaacatcttttatttccattctccacttaaatgcagcagcaggcaatacggaagtcaaaattacttttattttatttgcttttgccagttccgccatagaaacaatgtttccgaatgtataatcttcattatacgcttgtgtattttcagcgacatcatttgttccagcattaatcaccactaaagcaggagaaagattaatcacatcttcccggaaccgtaacaagaattgataggaagtctgcccactgattccacggccaatgtaaccatttgatttgaaaaaatccggatgagtccttacccatccttccgtaatggaatttcccataaaaataacccgtttgtctttctttgtcgcttgtggaagtgcagcattttcttttgaataacgacgtagattagcaaaatcatttttctgtgcatagctttctcctatcgagaaactcaagcaaacaacagccaataatatccattggccccatcttcttttattcatgtttatattaagtattagtaatattatatttcatgcaaagataaaaagaaaagcgatgcactatactttgtatggccattttttgtgcatttccatgccataatgtgctgataaatgtcagacgggagagattttttctgcatatttgttattgttttcagttttcctgcaaaaatacgccatacgcggggagcttctaaactcatcggttcttttcagttggtttcggttctaaatagtcatatacgttcgcatattaataacctttctttggggaagcaaaagttagaggctccatttacttgaaacaaagcctctgaatgtatcaaacggaggctctgccgcatgagtttagagcctccatttgggggataaaaaagcgcctttttgccgaacgcatagtggaacgctctccaaaggcagataactcgctatatggcagccggttacacctacctaaaaaagtcccccttgaacacttaccggtattattataaatatataaataataaactatatattaaaatatatagttcgatttttctattttttgaatctttataacgcaaatcgcatgtgctaaaatttatttgtagctttgcttttttcgaataaattcagctgttaaatcagttcatagtaattattaaaaaagttgatgaagaaagaagaatggaagcatccgcatttgtctatcgcccaaaacatcgaataaccgttaaggcgaaggtactttttcttaatctatgttatataacatacgttttttcttggattatttgctaatttcacgatagtccgtatctttgcactgtgtttttcatagtattagatttaaggttaacaaaggttggagcaaggcgttgctcctttttttatgtctatatgcttgatttcctaaaaaagaatggtatttttgtgaagtcacaattattatccgaaacatgaaacgcaaactgctttataccactctaataattgctatcctgtgtgtaatcagcatagttgtatgtaacaggacgatcaagaaacacacagtctccaaactatatacggaagtaaataccatcccttccaacaatgtaggattacttctcggaacttctcccaagttgaaaagtggaaataacaatttatacttcgattatcggattcttgcaacagtagagttatataaagccggaaaaattaaatatatcctcatcagcggcgataaccgtaaagaggattacaatgaaccggaagaaatgaagaaagcactcatgcaaaaaggtattcctgaaaaatccatttatttagattatgccggattccggactctcgactctgttgtacgtgccaaagaagtgtttggacaaaatcgtctgaccatcatctcccaacgtttccataacgaacgagcgatctatcttgcagagaaaaatggaatagacgccatcgggtacaacgcacaaaatgtaaatgcttatgccggactgaaaactaacatccgggaattacttgcaagagtcaaaatgtttatagatttaggtatagataaacaacctcatttcttgggagagaaaataataattgaataagcgagatacctccgatgcatggaagtgagtttaacatattctgaataaaaagtgatatacgtttctttattcccaaatatagctctacctttactgaaaaatcagaatatggcaaagattacagttcagaaaacagatgttactatcctaaaaatcaacgatacagattacatttccttaaccgacatagctaaatacaagacgacagatgccaatgctgttattgccaactggctacgtaatagaatgaccattgaatatttaggattatgggagatattgtacaacccccattttaaacccctcgaattcgaggggtttaaaaaagaagcaggactaaatgcgtttactctttcccctcaaaaatggatagaaaccacctgtgctattggaattatatccaaatcaggacgatatgggggcacttttgctcacaaagacattgcattcaaatttgcaagttggatttccgttgaatttgaattatacatagtaaaagaattccaacgtctcaaagagcaagagcaagctcaacttggttggtcggcaaagcgagaattatctaaaattaattaccatattcatactgatgcaatcaaacaacatcttatccctcaagaaatcacttcacagcaaacatctatgatttatgccagcgaagctgatgtccttaatgtagccatgtttggaatgacagccttagaatggcgggatacacaccctgatttaaaaggaaatatccgcgattatgcctcaatcaacgaacttatctgcttatcaaatatggaaaacttaaatgcagttttcataaacgaaggtttggcacaaaaggatagactcatcaaattaaatcaaatagcaattcaacaaatgaacatattagaagatattaaagataaaaagttattgaaataatttatggaacaacaaattcaactcaacgatcacaacaagcaggaataccctcctatgcatacagcagagcatttactcaatgccaccatggtgaaaacctttggctgcccacgttctcgcaatgcccacatcgaaagaaaaaaaagcaaatgtgactatatactttcgtcatgtccgacagcggaacaaatccagtctattgaagatagagtgaacgaggtaatcagtcagaacctacctgtgactgttgagtttatgactcatgaacaggccaaagatattgtagatttaagtaagctacctgccgatgcaagcgaaactcttcgcattgtccgcattggagattatgatgcctgcgcctgcatcggattgcatgtatcccatacttctgaagtgggtaccttcaaaatcattagttatgattatgacgaagaaaggcaaacactaagaataaggttcaaactgatcgagaagaagtaaacaggttatcaaattaatatctatcttatataaaataaataaaaacaggatacattttgtcatttatattgcaaaaatgacattataaaaatgacaaatagacaattttagtttctaaaatctcttggcataaggtttgcatttatagaagcgaacaacggttcgagagcggacgatggaaggcgggataaccgataccatcggaagtgaaaatgccgaagttctaaatttattaattgaatgtttaacttaaagataggagactaaaattatgatgcctgttagaagaactcaaagttggttaccaagtatctttaatgatttctttgataacgattggatggtaaaagcaaatgctactgcacctgcaattaatgttttggaaacagaaaaagagtacaaagtggaattggctgctcctggtatgacgaaggatgatttcaatgttcgcattgatgaagacaacaacctcgttatcagcatggagaagaagactgaaaacaaggaggaaaagaaagacggtcgctatctgcgtcgcgaattctcatactctaagttccagcaaacaatgattctaccggacaatgtggacaaagaaaaaattgctgcatccgtagaacatggtgttttaaacatcgaacttccgaaactctctgaagaagaagtgaagaagcccaatcggcaaatcgaaataaagtaatacggtaaccacttgctgttcaccggaaacggtgataagaagtaataaaacagctctttccctgaaaaggaaacgagctgtttttatattattatccttagttattcttccgataactaatcactgcccaactattaaacactactgcaaaaaacaacaatactccaaactgtggcagtaaatcaaagaaaccactaccctttaaatacaccattcgcatcacttccataaaatacctcaaaggattgagcctggttattatttgagcccattccggcatactgctaatgggagtaaacaaaccactcatcaaaattacaaccaacaaacagaaccacataacaaacatagactgttgcatcgttgccgagtagttggaaataacaagtccgaaaccggacattaccagaacgaaaagaactgcgaaaaagtaaatcaatagaaaatgaccgaccggcactatgccataaattaaccaagctaatatgaaacatacagtcagcaccacaaaaccaatcaaccagtaaggcaggagctttgccaaaataaagataaacttcggaaccggcgtcacattgatttgctcaatcgttcctacttccttctcgctaactatattcaatgcaggcaagaaaccacaaatcaaagttaataacatgaccatcaatgccggaatcatatagagtttatagttcagattcggattaaacaacccctgtgtatcaatgcctatcgaagggaaagcaccggagactgtagcagttgcaggatattccgaacgcagctcggctgcataatcattaataatagaagatagataagaactccccagccctccttttgtcccattcacagcattggctgctatcagtatgtgggtatcttctccattcatccaatcccgttccagatgccgcggaatttccatcacaatatccgccgttccaatttcaatattccgtaggccttcttcatacgaagccggcacttccaccagacggaaataggtagaggcggcaatcttattgactaaacgttgtgaaatagccgaatggtcattatccacaatattcagctgtatattcttgatttccagatttaccgcccaaggcatcagcagcataatcatgcatggaaatacaagaatcaatttcggaagaaacgaattgcgaagcaattgtttaaactctttttctatcaggaactttatcataaataattcttccatttatcaatctgcccattagcacactgtatagtattcatacagccaattggcatatcgacatattattccaatctatacttaaatttcttgatactgatcgtaataagtaccgtcgccatcaataacaagataccaatctctttatacaccaatgcaactggtactccttcaatcatcagtttacgcacagcctgtatataccaacgtgccggaagtatatccgagatccattgaagtatcaccggcatactctctatagggaaaatcatgcccgataaaagcattgtgggcatcatcagcatcaatccggaaaccagcatggccgcaacctgtgtacgtgtgactgatgaaatcaataagcccaatgccaatgatacgaagataaacagcaaagataccgtgattaaccagaacaaacttcctaccaccggaacatccaacacaaagaccgaaagcaaaaggatcgttatcagattgacgaacgacagcacaaaataaggtacagcctttgccaaaataataaatagcggcttcacaggtgaaaccaataatacttccatcgtgcctgtttctttctcacgaacaatggaaatcgaggtcatcatggcgcaaatcagcatcaggatcaagcccatcactcccggaacaaagttataagcactcttcatctgcgggttgtagagcaatttgatatcaggagtcaggcgggcagccgacatattcgggggaatcatctcctggcctaccatagaaacgattcctgtcgcataattaacttgcgaagtcgacatattgggatctgttgcatctactatcagctgtacacgagcatcacccgtatagagatcatccgcaaaccgttcgctaaagacaatcgccatatcaacttcattctttaggaaagcagcttccatttcctggggcgaatgaaaacgtgcagtaacggtgaaatactcactggcatccaaacgatcaattatttttcgcgttaccacatcattagaaggatcgagcaccgccaaccgaacattcttcacttccgtgctgatagcaaaaccgaatagaataatttgcacgacaggcatccccaacaaaatcagcatggttcgccggtcacggaaaatatgataaaactctttctttataaaagctataaactgtctcataatcaatctgctttgcgcaccgcaccgcgggctaatttctgaaaaacgtcatccatcgtttccgcaccgaattgttgtttcagacgggcaggtgtatcaagtgcttttatctgaccgtccaccatgatagatatccggttgcaatattccgcttcatccatataatgggtagtgacaaacacggtaataccctgatcggctgcctgatagatcaattcccagaactgtcttctcgtagcaggatctactccgcctgtcggctcatccagaaaaacgattctcggttcatggaatattgatactgaaaaagccaatttctgtttccatcccaccggaaggctcttcaccagagtatcccgttcggcagtaagctccaaacgatccaacaattcttccgtcttccgttctatgtcttgttccttcatgccataaattccggcaaacagacggatattctcccacactttcaggtcttcatatagcgaaaacttttggctcatatatccgatatgtttcttaacttgttcggcctcccggtaaatatcatatcctgccaccttcccgatgcctgatgtcggtttacttaatccgcaaagcatacgcatagctgtcgtctttcctgctccattagcacccagaaagccaaatatctcgccccggttcacctgaaaggagatatgatctactgcagtaaaatctccaaaacactttgtcaactgttccacttcaatgaccggagctacttcatgcttcacttcctcccgctccaaagaaggagggcaaaggatagacgcaaattgatgaagaatacgttccggggtatcaatgccatgaatctgtccatgattgatgaaagcaatccggtcacattgccgggcctcatccatgataggagtagaaacgacaatggtaataccctgttcccgtaagtttcggagcatttgccagaattccttacgcgacacgggatctactccggtagtaggttcatccaggaataaaatattcggtttatgaatcaaagcacagctcaatgccagtttctgcttcataccacctgacaaagcccctgcccttcttttcctgaacggttctatctgttgatagatatctttaattaaatcataattctcctgaactgtcgtatggaacacggtagcaaaaaactccagattctcttctaccgaaagatcctggtaaagtgaaaaacgaccgggcatatatcccaccttcgtacgaatctgtttataatccgttaccacatccagcccggcaaccatggccgttcctttatccgccagcaacaaagtagtcagaatacggaataaggaactcttaccggcaccatcaggccctatcagcccaaagatttctccccgttccacaacgaaagaaacgtctttcagcgcctccactgttccatagttcttgccgacttctttcacaaccactatgggttctcccttttccatctcctctccttcaatttttaatcattaatttttcaatgtcactcctccgtacataccaatcttcaatgctccgtcattcttcacggcaattttcactgcatataccagattagcacgttcgtttttcgtcaaaatcgttttgggagtgaactccgaacggtcggaaatccaggtcactacccccggataagctttctgctccgagtttccataatcagcatacacagttacctcatctcccagtttcacttgcgacaactgttcggaggtaatgtaagccctcaaatacatgcgatccacttcagccactttaaacagcggtttacctatcgccgccaattcaccggcttctgcatattttgccaatactgtaccttcgataggtgactggacatgacatttagctaactgatcctccatctgtgcaacctgtatggcaaccgaatttccttgttctatcaggctatttgtactattctgcaatgatgattcctgtgcgacaagctgcctttcaagcaatttgacttgtgcatcccagtcgtccaactgtttctgattcgccgctccagcagcaagcaggttttccacgcgtttcttttcacgttcagctgttgctatttgctgtttggtagcagctatctgtttagcaagatccggacgttggctttccacagatttcatactggcctccagttgtaatttcttcaaatacaattgcaccgtatccaccagtccaatctcctcacctgctttcagtcttgtcccctcttctacctccagtcgcaacaactttccggcagcttcggcagagactatcacttctgtggcttcaaacgtgccggttgcatcatagctgggtattcccttaccacaagcagccaacattatcaatgccactccaaccattcctatctttgtcattcgttccatatctaaagaagttatattaatcattcgtagtatatttcaattgataaattcccattaaccgttgaatttcatgcaacgctttcgactgacgtgccaaactctcattggtcaattcccgaagcatctcggtcaccgtcaatgttccattcgccactttggcttctgccgatttgcgaatattggtacgcaaacggataatctcatcatcatcctgcatttgcttttccaatgattggatagcctgatcctgttgtgtcatctccaatcttgtattaaaaagaaatacatcccggttattatccaattgccggcgtttattttcaattaccttccggtcattctttaaggtgtacaaactaccgaaattccatgaaaggcgaacacccgcaatatagtagggagaaaattcatttttcagcatattcaatccggggtttccataagctccctgcacgaataatccgaactgtggaagatgacgcacattcaaagctttctcctgtacttgcaatcctacttcttgcgcattgaacaaagataattccggacgacgaatctcaccgacagccgaaatgtcatcttgaggaacaggtttctccaaaaccgtttcctgcgacaacttctctcctaccagaagtgaaagcatcttcaaatatgccatacgcgacgaaaccagttcaactcttttctgctttgtgttcaactgctccactttcacagcatccaaatcggcctgattggcaatgccattttctacgtaggcagtaatctggcgataatttctctccagttcatcttgcaacaatgcattctgtttcagctgctcgtccaacaaaagaattccaaaataaaggtcatttacacgactattcagcgcatacatatccacattcagcttttctttctctatctccgcttccgcagtcgtttgtttcttctgcatccggattcctccgccatcccagattttctgttgtaactccaacatcacctgatattgatctttcggcagtcctttcaaatccactccgggaagtttcaccggaatttctgttacctcactctgataagaagctttagccgaaagggcaaactgtggcaaatatccttttgccgcattctcaagattatattcctttgttttctccaccagaccatactgatgtaccaacggataattttcctgcgtcttccgttgacattcttccaacgttatctgcgcatttattcccgatacaaacaataaaaaggagaaactgaaaaacattcttttcatacacatcatttctttaatttcttcaaaagacaaagatagaggtttcaaaaatacattcacattccgatagttagtaaaaatgttccaatagttcgataaagagaaagaataaaaggctatttgctgatttttattatctttggcggaaaaacagatagaaatggaaaagaaaataccattgaacataggtctcgaaatcttagtaaatccggatgtcgtccgatttaacgaatttcgttttatatctccgcatttcggattcgtaaacagcttcgccaaaatagaatccaatcttatcacagtggatcaaccttaccgtatcaaagagggacgtatcgcagtcatcaaacagggatatgcacgcgtattaatcaacctgatagaagaaacttttcagccggacaagctattagtaattgttccgaattccattcttcagattatagaagtctctccggattttgatatgcagatggtaggcatggacgcagaatttctttctatagccggaaaagacaatttcttcactcatctttcacagttacagaaaaacctcatattatctctgacctcacatgaatacggcttgtttaagagctactttgctttaatatggaatatattacaagaaccaacgttccgacgggaagctattcaatatctactaatcagtcttttgtgcaatatagagtatcttgtcaaaaacaacaatcaaaaagaacagagttgtcagacacatcaggaagagattttccagcgtttcatttctttagtcaatgcttatagtaagagagaacgtaatgttagtttttatgcggataagctatgtctcactcctcgttatcttaatactatcatccgccaaaccagtcaacaaacagtaatggactggataaaccagtccattatattagaagctaaagtattgctaaaacatagcaatctgcttgtttatcaaatttctgatgagttgaacttccctaatccttcttttttctcgaagttctttaagcgaatgacaggaatgacaccacatgaatatcaattctcgaaataaaatttatttcgagaattccttaattctttgctcttcttccaatttgcagatcaataatgtgttatctttctctgcaatgatatatccatccaagccttgaatgactactcgtttttcttcgctggcatgcacaatacaatttttgctttcgtacaaacggatatcggttcctacggttgcatttccagacttatcctgtggaagcaaaccgcgaagtgctccccatgtacccagatctgaccagccaaaagaagcgggaagtacataaatctcctgtgctttctccatcactgcatagtcgatagaaatgctttcgcaagtagggaataacttcttgattgtttcattttctttctctgtatagaaatcggggaaaatgcgatcgaaaatttgtgcgatgcccggagcatatacacgcatcacggaagtaatagtacgcacattccatacaaagattcccgcattccagaagaaattgccttctgccagatacttttcggcagtctctttatccggtttttccttaaatgcatctacggtgtaaatttctttatctgtctggagctgatcggcagcagcaatatatccgtatccggtttctggacgagttggccggatacctatcgttacaatggcgctgccatcatctgtgaaacgaagggctttctccatcactctacggaattctcccgtatcaatgactaatgcatccgaaggagttactacaatgttagcattcggatgttttttcttgatcttccagcaagcaaaagcaatgcagggcgcagtattgcgcgcacaaggctccgccaaaatattactttccggaatttccggcaactgctcccgaacaatatcaatgtatttttcagaagttacgacccacatattttccctagggcaaacaccgtcgaaacggtctgccgtcaactgaatcagcgaccggccacatcccattacatcaataaattgtttaggacattccggagtgctcatcggccaaaagcggctccctatgccaccagccattattacaacatgattatccatacctgttattctcctgttaaaaaaatattctttgaaataggtgtgcaaggtacttcaaaatgtccaaatctacaagaaaaacagaacacttttgtcataattcggtagaatctagcatcctggcagccccctcttccacttttgtctgccttcctctgcttttctgattcacattacttctccggtttccaactgaaatgcaggctttcggttcgtgccttcattgctaatattcgcaattcttccactttttgaggattctctttcaataaatcatgttgctcccctatgtcatccggaagataatataactcttctttcaacttttccggtttcgacatatttaatcgaaccagtttccacccatctttcagaatcgactgctttcctccctgttcataaaactcatagtatatatattcatggctacgagatacttcaccgtttcctgtcaacaaaggcaaataagagataccatcaatccctttcaccatatcagctccgacaagttcggttacagtcctacaacaacaaaggccgctcccgaataacaggaacggccttaccattttcatttcaatgtgatgtcagcctcttttcaaaaagatgacattctgcttatttatactctgcccagctcttgatggctatatcatccacactcatcgtacagaaggcattgataaatgcactagccagacgggcattcgtaatcaacggtatattcaagtcaatggcagcacgacggattttatacccattacttaattctccggctgtcagattcttcgggatattgactaccatgtcgatctccttgcgatgaagcatctccaatgcttgcggatgtccctcctcactcggccaatagacatgagtactttcaattccattctctgcaagcgttttgtgtgtaccacccgttgcaaagagtttgtatcccttattcaccaacatacgggccgcatccatcatatcggctttctgtttcattgttcccgtagacagcaggatattcttcttcggaatacgatagcctacggaaagcatcgctttgagtacggcacaggaagtatccattccgatacaacccacttcaccggtagaagccatatctactcccaacaccggatcagccttctgcaagcggttgaaagagaattgggaagccttgattcccacataatccagttcgaagagatttttttccggtttctccacaggcagaccgagcattactttcgttgccagctcgataaagttgatcttcaacactttgctgacaaacgggaaagaacgactggcacgcagattacattcaatcaccttgatatcgttgtctttcgccagatactgaatattaaacggaccggagatattcaaagccttagcaatctcacggctgatacgcttaatacggcgaacagtttctacatacagcttttgcggcgggaactggattgttgcatcgccggaatgtactcccgcaaattcgatatgctcacttatagcgtatgctacaatttctccattctgcgccaccgcatccatttccacttccttggcgtgttcgataaactggcttactaccaccggatgtttcttcgatacattagctgccagtttcaagaaacgttccaattcttcctggttggaacaaacattcatcgcagctcccgaaagcacataagacggacgaacaagtacggggaaacctacctcttcaacgaactcctgaatgtcatccatagaagtcaactcacgccaacggggctgatccacaccgatacggtcaagcatggcagagaatttctcacgatcttcggcattgtcaatactcttggcactcgtacctagaatattaatcttctgtgcatccagacgcaaagcaaggttatttggaatctgaccaccggtagatacaattaccccatgcggattttccagttccagaatatccatcacacgttcaaaagtcaattcatcaaagtacaaacggtcgcacatatcgtagtccgtggatacggtttcaggattatagttaatcatgacactgcgccatccctctttgcgaatggtattcaaagcctgtacgccacaccagtcgaattctacggaagaaccgatacgataagcaccggaacctaatacgacaatagatttatggtcgcccagataacgcacatcatttgctacaccgctataagtaagatacagataattggtttgtgccgggtattcggctgccaacgtatcgatctgtttcactaccggaagaatgcctgcctctttacggtgtttgcggatataaagaattccatcttccatatcaccttcgtaaccgatggcacgggcaatctggaaatcggagaaaccttgaaccttagctttacggagcaattcgttcgacagatcggcaatctgtttgtgattgtttccccaactatgcagttcttcggaagtcttcataatattcattaacttctgcaagaaccatttatcaatcttagtcaattcgtgcacctgatcgatggtgtagccagcgcgaaacgctttcgagatcacgaaaatacgtttatcggtcggttcgcgcaaggctttatcaatgtcggaaataaccaattctttgttctccacaaaaccatgcattccctgtccgatcatacgaagacctttctggatagcttcttcaaaagtgcgtccgatagccatcacttcacccacagatttcatagaagaacccaactctctatctacaccgtggaatttacctaaatcccaacgaggaatcttacatacgacataatccagtgccggttcaaagaaagcggaagtagtcttggttacagaattcttcaggtcgaagagtccataacccaatcccaatttggcagcaacgaaagccagcggataaccggttgccttagatgctaaagccgatgaacgggaaaggcgggcatttacttcgatcacccggtaatcttcggattcgggatcgaaggcatattgtacgttacattcacccacgataccgatatggcggatgatacgtattgccaattcccgaagtttatgatactctttattggtaagcgtctgtgaaggagcaataacgatagactcaccggtatggatacccagcggatcgaagttttccatattacaaacagtgatacagttatcgaagcggtcacgtaccacttcatattccacttctttccagccgcgtagtgatttctccaccaatacctgtggggagaaagagaatgctttttctaccagcacatccagttgttgttcattatcacagaaaccggaccccaagcctcctaacgcataagcagcacgaacaatcaccggatagcccagttcttttgctgcgcgacgtgcatcttccgcattttctacggcttcactcttgatggtttttacattgatctcattcaatttctgaacaaaaagttcacggtcctcggtatccataatggcctgtaccggagtacccagcacttttacattatatttttcaagaataccttctttatacaatgctactccacagttcagagccgtctgaccaccgaacgccagcataataccttccggtttttctttctggatcactttctctacgaagtacggagtcaccggaagaaagtaaatttgatctgccactccttcggaagtctgcaccgtagcaatattcggattgataagaatggtttcaataccctcttctttcaaggctttaagtgcctgtgaaccggaatagtcaaattcaccagcctcaccgattttcagggcacctgaacctaatagcaatactttctttatattttctttcattgttacaatagttttacaaattcgtcgaacaggaattccgtatccgtaggtccactcgcagcttccgggtggaattgcgcagagaaccagggattctttttatgtttgattccctcgttggacccatcgttcatattgataaacaacggttcccactctgcactcaacgtattattgtctacggcataaccatgattttgtgaagtaatgaaacaacgttccgtacctaccatacgcaccggctgattgtggctacgatgtccgtatttcaatttataaatcttggctccgcccgcttttgaaagcaactggttacccatacagatgccgaagataggcagtttctcatttaccatcgccttccgtatattctgtaccgcagcatcacaagtatccgggtcacccggtccgttggagataaacaacccgtcaaattcgagtccgctataatcataatcccaaggtacacggatcacttctacattacgtttcagcagacaacgaataatatttgtctttacaccgcaatctaccaggataaccttcttaaattgagaattgaaagttgagaattgagaattaagctgcgcataggaactatttacggagaaagtttgtgaagttccggcaggaaaatagcaaataatctctttgcaagatacacgatctacataattaacgcctgcgtatactgcttcaggcacattatccggttcatcatcgaaaacgatttttcccatcattactccatgttcacgaagaaccttagtcagctcgcgcgtatcaatgcctgtgataccgggaatctgctcgcgtttcaaccagtcaccgagactttccaccgcattccaatggctgtattcataagaatagtcacttacgataatcgcttccgcgtggattttctcactttccatgaaagtggcaagtccattcggttcgatggtaaaaggaggaacaccgtagttgcctaccagaggataggtaagcgtcatcaactgtccggcgtatgaagggtcagtaaggctctccgggtatccggtcatggcagtattaaaaactacttcgcctgccaccggcttctcgtagccaaacgacttaccggaaaaccggctcccgtcgtcaaggattaatgtcacatttctcattcttattattgaatcgttgtatggttgttagaattgatacatttgttctatatagtcgatgaacgcccggttcaccattttcacacctcccggtgtagggtagttaccgctaaaataccagtcgcctttatgacgcggacaagcctcgtgcaatccctccaacggttgatagacaatttccactttcgcctttgttcccttgggagtcagcagttccaccatcttgccagagatttcctcatcggtgaacggagcatagatatccttcacatagtttatcatctgctctttcggcagtcccacctgatctttcgatttacggtaggcagccgcaatcacatctttcatatcccgctcctttaaaagttcgacagcagccctgaaagcgataaactcactcatctttgccatatcgataccgtaatagtcaggataacgcacttgcggagaagaagatactatcacaatcttcttcggaccgagacggtcgagaataccgataatactttgtttcaacgtagtaccacgcacaatgctgtcgtcaataatcaccagattatcaacaccgggtaccagacttccgtatgtaatgtcatacacatgggctgccagatcattacgactgtttccttcggcaataaacgtacggagtttgatatccttgattgccaccttttcgctacggatacggcgggaaagaatgacttccagttcctccatatccggatgatgccctaatgcagcaatttgctgcactttctcctcattcaagtaatcgtccagtccctgtaacattccgtagaaagccacctccgcagtattgggaataaaagaaaaaaccgtatgatcgatgtcattattgatagctttcaatattctcggaaccaacttttcacccaaccgtttcctttccttataaatatcgacatcactcccacgggagaaatagatacgttcaaaagaacaggcatgattttcgcgcggcttgttaatttgcgaagtacggattttaccttctttgctgattaacaatgcttgccccggttgcaattctttgatttcctcaaacggaacattcaaagccgtctggatcaccggacgttcggaagcaagaacagctatctcatcatcctgataccagaatgcaggccggattccccacgggtcgcggatggcgaaggactcgccgcttccggtcaatccgcagatcacgtatcccccatcccattcgcggctggaagtgcgcaacacgtttgacaaatcaatatattcttctatataatgagtgattcccatgcccgtaagcccctcggcttcggcaagattgaatacacgctccacttcacggtcaagacggtgtcccacctgctccaacatgatatatgtatcggcatatttacgcggatgctgaccaatggcagtgatacgggcaaatatctcgtccacatttgtcatattgaaatttccgcagagggccagattcttggcgcgccagttatttcttcttaaaaatggatgcacataagagattccggattttcccgtagtagaataacgaagatgtcccatatatatttcaccggcaaaaggtaaagttcgtttagcatactctgcatcgtgcaactgttcgggagtgagatccttaaaattattttgaatattttcaaagatttccgtaatggctccggaacctaaagcgcgttcacgaaacatatattcttcacccggatttgcttccagtttcacacatgccagtcccgcaccttcctgtccacgattatgctgcttctccatcaacaggtagagtttattaagaccatacatccatgtcccgtactttttctcgtaatactctaacggtttgagcaagcgtatcatggcaacgccacattcatgtttcaattgttccatctatactatttacgatttgacgatttactatttacaatttaaattaccacccaccaatcaaacaacttactatccatcattgattcttcaatcgtaaattgtctaattgtaaattacattactctactgttaccgacttcgccagatttctcggctgatccacatccatccctttgcataccgcaatgtggtaagcaagaagttgcagaggtaccgtagtaattaacggatcgagacattcgattgtttcaggaagttcgatactacagtcagcgattttgctgataacggtatctcctttcgtcacaaatgcaatcacttttcctttccgtgccttaatctcctgaatattacttactactttctcatacaacccattctgcgtagcaatcaccactaccggcatttccgcatcgatcagggcaatcggtccatgcttcatctccgcagccggataaccttcggcgtgaatatacgatatttctttcaatttcaatgcaccttccagagcaacgggataactatatccgcgtcccaggtaaataaaattatgcgcataagtgaaagttttcgataactccgccaaagtatcattcaattccaacacctctttcattttttccggaatatgatttaactcctgtacgattgaaagaaaatactgttcgtcaatggttcctttcgctttggcaagtgtcaatgccaacatcgccaatacagtaacctgtccggtaaatgctttggtagaagccaccccgatttctggacccacatgaatatatgaaccggtatgagtggcacggggaatagaagagccgatcgcattgcaaatgccatatataaatgccccgcggcttttcgccaattccacagcagccaatgtatctgccgtctcgccactctgggaaattgctatcaccacatcctgcccgtcaatcaccggatcacgatagcggaattcggaagcatactccacttccaccggtatgcggcagaaactctcaatcagatgcttaccgatcagtccggcatgccaggaagttccgcaagcaacaataataaaccgtttggcattcagcagcttttcccggtgatctatcacagcagaaagcaccacattatcagcttccacattgatacgtccgcgcatgcaatcacgaatacaatcgggctgttcgaaaatctctttcaacataaagtgcggatatccccctttttccaactgaccgaggttgagttccaccttctttatttcaggtatcatttcgacattgttcaagttgactaccttcaactccttccccagattcaaaacagctatttccccgtcttccagataaaccactttatcagtatattctacaatcggagtagcatctgaagcaagaaagaactcattctctccaatccccactaccaatggactgctcttacgggcagcaataatctcatcgggatgctccttatcaagaatcgcaatcgcataagcaccaattacctcccctaacgccaactgaacagccgtcaacagactgacctgattagtgactttcatgtattctattaattgaacgaggacttcggtatctgtactacttttaaaaatatagcctttggcttgaagtttttctttaagaacggcgtagttttcaataataccgttatgaatgagagcgagcttttcggaagaagagtaatgagggtgggcgttaacagaacaaggttccccgtgagtagcccaacgggtatgggcaattccgattgtaccggaaatatctttctgtgtgacgaaattttcaagatcagagacttttcctttcgtcttatacacatttaactgttggtcatcactaatgattgctacccccgcgctgtcatatccacgatactccagtcgcttcagccctttgataaggatagggtaggcttttcgtttaccaatatagcctactattccacacatattatgatatttttatttcgcctgcaaatatacacattacaaataacataaagacaacaaaaagcatatttatttgacagaaacgcataaaaaagttgcaaacacatcaaaaagttaaataatatattatttttagctcaaaaagaaacaaattacaatcagcttcaaataaggataaataagctaacaaattaaaagcaaatttcctgtttttaataacaaattaaaagaataaagattcctattctcatttcgcgtcacacaaaagctaaatttcactatcattttgaaattaaaatattaactttgccaaacaatttgatacatcaaacaggtattatcatacaataaagctagtaagaatgaagaaacaagaactttttaacaacgtaacagaaggattcccttaccaacgacagccccaacaggtgggcttgtacgatgcggcatacgaacacgatgcctgcggtgtcggtatgctggttaacattcatggagaaaagtcacacgacattgttgagtcggctttaaaggtattagaaaacatgcgccatcgcggtgccgagggtgcggataacaagaccggtgacggtgcaggtatcatgcttcaaattccgcatgagtttattttattacaaggtattcctgtccccgaaaaaggacggtacggcacaggattattgtttttaccgaaaaacgaaaaagaccaggcagctattctaagtattattattgaagaaattgaaaaagaaggactcacattgatgcatttgcgcaatgtgcccacctgccccgaaatcctgggagaatcggctctggcaaacgaaccggacatcaaacaagtgttcatcaccggatttacgaaaacggaaactgccgaccggaagttatatctgatccggaaaagaatcgaaaataaagtcagattgtcatctattccggcaaaagacgatttttatgttgtgtcactctctaccaaaagcattatatataaaggtatgctttcatcattacagctgcgcaactattatccggacctgacaaatagctattttaccagcggactggcattggtgcactctcgtttcagtaccaatacattccctacatggggattggcacagccgttccgtctgctggcacacaacggtgaaatcaatactatccgtggtaaccgaggatggatggaagcccgtgaaagtgtactctccactcccactttaggcgatataaaagaaatccgcccgattatacaaccgggcatgagcgacagtgcttctctggacaatgtactggagttcctggtgatgtcaggattgagcctgccacatgccatggctatgctcgtgccggaatctttcaacgagaagaacccgatcagtgaagatctgaaatcattctacgaataccactccatcctgatggaaccgtgggacggaccggccgcactactattcagcgacggacgatttgccggaggtatgctcgaccgcaatggcctgcgccctgcccgttatctgattactaaaaacgatatgatggtagtggcttcggaagtcggtgttatggatttcgaaccgggagacatcaaagaaaaaggtcgcttacagcccggcaaaatcctgctggtagatacggaaaaaggcgagatctactatgacggcgaactgaaaaaacagttggctgaagccaagccttaccgcacctggctatctaccaaccgaatcgaactggatgaactgaaaagcgggcgcaaagttcctcatcacgtagcaaactacgaccggatgcttcgtactttcggctactccaaagaggacatcgaaaggctgattatgccgatggcaagcaccggagcagaaccgatcaattcaatgggtaacgatacgccactcgccgtactttcagataacccacagttgctttacaactatttccgtcagcaatttgcacaggtaaccaatccgcccattgatccacttcgtgaagaactggtgatgtcattgacggaatacattggagcagtcggtatgaatattctgacgcccagtgaaagtcattgcaaaatggtacgcctgaatcatccgattttaagcaatacccaactggatattctttgtaatatccggtataaaggcttcaaaacagtcaaactacccatgttgtttgaggttgccaaagggaaagccggactgcaggaagcactgacccatctttgtaaaatggcggaagaatccgtgacggaaggtgtaaactacattgtcctgaccgaccgtgaggtggatattacccatgctgccattccatcattgctggcagtaagcgctgttcatcaccacctgatttcagttggtaaacgggtgcaaacggcattgatcgtagaaagtggtgaaatacgtgaagtgatgcacgccgcgttattgttgggtttcggagcaagtgccctgaatccttacatggcattcgctgtcctcgaccgactggtaaaagacaaagatattcagttggattataccactgctgaaaagaactatatcaaatccatctgtaaaggcttgtttaaaatcatgagtaagatgggtatctctacgatccgctcctatcgtggtgctaagattttcgaagctgtcggtttgagtgaagaattgagcaaggcttattttggaggactcggttcaccgatcgaaggtatccgtctggaagaaatagccagagatgccattgctttccataaagaaggatttgaaagtattaaaaatgaagagttattaaaaaataacggtttgtatgctttccgtaaagatggagaaaagcacgcatggaatccggaaacaatcagcactctgcaattggctacacgactggggagttataaaaaatttaaagagtacacccatctggtagacgaaaaagagaagcctattttccttcgtgactttctgggattccgtcgtaatccgatttcaatcgatcaggtagaaccggtggaaaacattctgcatcgtttcgtcacgggggctatgtcttttggttctatcagcaaagaggctcatgaggcaatggctattgccatgaataaaattcacggacgcagtaataccggtgaaggtggcgaagacgctgcccgtttccaaccgctgcccgatggcagttctttacgaagtgcaatcaagcaggtagcttccggccgtttcggtgtaacggcagaatatctggttaatgcggacgaaattcaaatcaagatagcacagggagccaaaccgggtgaaggcggacaactaccgggatttaaagtgaacgatgtgattgcgaaaacacgtcattccattccgggaatttcgctgatttctcctccgcctcatcatgatatttattcgattgaggatttggcacaattaatcttcgatttgaaaaatgtaaatccacaggccaaaatcagtgtgaaattggtagcagaaagcggcgtcggtacgattgctgcgggtgtggcaaaagcaaaggcggacctaattgtcatctctggtgctgaagggggaacaggtgcttctccggcttcttctatccgctatgcgggtatctcaccggaattgggattgagcgagacacagcaaacactggttctgaacggacttcgtggccaagtagttctgcaagccgacggacaactgaaaaccggacgtgacatcatcttaatggcactaatgggtgccgaagaatatggcttcgccacctcggcattgattgtattagggtgtgtaatgatgcgcaaatgccatcagaatacttgtccggtgggagttgccacacagaatgaagagttacgtaaacgctttcatggacgcagtgaatatttagtaaactttttcacattcctggcacaggaagtccgcgagcatttggctgaaatgggattcacccggatggatgacatcatcgggcgtacagacttaatcgagcgcaagtccgatgccaatgacccaaatccgaaacatgctttaatcgacttcaccaaattgctggcacgtgttgacaacagtgcggctatccgtcatgtcatcgaccaagatcatggaatttctgctgtaaaggatgtaaccatcatcgatgccgcacaagaagctatcgaacatgagaaagagatttctttagaatatacgattgccaatacagaccgtgcaataggtgctatgctttccggagtaatcgccaagaaatatggtgccaaaggattgccggaacatacgctgaatgtaaaattcaaaggttcggcaggtcaatctttcggagcttttctcgtaccgggagttaactttaaactggaaggtgaagcgaatgattacctaggtaaaggattgagcggcgggcgtatctccgtattgcctcctatccgcagcaatttcgaagccgaaaaaaatacaatcgccggtaataccttgctttatggcgcaacaagcggtgaagtatatatcaacggccgtgtaggagaacgtttcgctgttcgtaactccggcgcagttgccgtcgtagaaggcgtgggtgaccattgttgcgaatacatgaccggaggtcgtgtggtagtcctcggacaaaccggacgtaactttgcagccggtatgagtggcggtgtagcttatgtatggaacaaagacggcaacttcgattatttctgtaacatggaaatggtggaactgtcactcatcgaagaagccagctaccggaaagagttgcacgaactaatccgccagcattacctctacacaggctcgaaactggcacgcatcctgctcgacaattggaatcattacgtagatcaattcatccaagtagtgcccatcgaatacaaaaaagtactgcaggaagaacaaatgagaaagttacaacaaaaaattgcagatatgcaaagagactattagatttacaatttgactatttacaatttactatttgaatgtatagtatagtctgtaaatagtcaaatagcaaatgataagatagtctagaaatagtaaatcgtcaaatagtaaataacaagatgggagatcctaaagcatttctaaatatacctcgacaagaggcgggataccgccctgtaaacgagcgaatcgctgactatagtcaggtagaacagactttgaatacaaacagccgtaaattgcaggcgtcacgctgtatggattgcggtgtacctttctgtcattgggcatgcccgataggaaataaacaaccggaatggcaggatgcattatacaggggaaaatggaaggaggcatacgaagtattgtcgtctacttgcgattttcctgaatttacaggacgtatttgtcctgctctttgcgagaaatcgtgtgtgttgaaactttcctgcgatcagccggtgactattcgcgagaatgaagcagctatcgtagaagcggcttttcgtgaaggatatatacaagtaaagacgccggaaagaaacggaaagaaagtggcggtgattggtgcaggtcctgctggattggtggtggctaatcagctgaatttaaaaggatatagcgttactttattcgataaggatgaagcgcccggaggattattacgattcggtattcctaatttcaaactggataaaaatgtaattgaccgacggatgaagatattggctgcagaaggaatacagtttgagatgggagtagaaatagacgttaatcatttaccggaaggattcgatgcttactgcatctgtaccggaacccccactgcacgtgacttgagtattccgggacgtgaactgaaagggattcatttcgcactcgaaatgctggcacaacagaataggattctggcaggacagactttcccgaaagacaagttggtaaatgccaaaggcaaaaaggttctcgtgataggtggcggagacactggttccgactgcatcggaaccagtgtgagacagggagccgtcagtgtcactcaaatcgaaatcatgccgaaacctcctgtcggctacaatccggctactccttggccacaatggccggcagtcttcaaaacgacttccagccatgaagaaggttgtacacgccgctggtgcctggcttccaatcagttcctcggaaagaatggaaaagtgacaggtgtagaagtggaagaagtagaatggattccggcagcagatggcggacgtcccacaatgaaaccaacagggaagaaggaagtcatcgaggctgatatggtattattggcgatgggattcctgaaaccggaacaacccaaatttgcaaagaatgtatttcttgccggtgatgccgagactggtgccagcttagtagtacgcgccatggcaggaggacgaaaggctgctgcggaaatagatgcttatctaatacaataaggtttgcaacagtgtacaacaagaagctcgattgctattatcggttcgttccatatctgtagaactaaagaataacagatatggaactaaaggaaaacagttgtggaactaaacgataacaattatggaacgaattaagaataactagtcagcttcttagaaatagcgaataaacaatcaacagattacattaccccctctaaaaattaaagttatgtgtggaatagcaggtatactcaacatcaaagttcaaacgaaagagctaagagataaagcactgaaaatggcccagaagatccgtcatcgcggaccggactggagtggaatctatgtaggcggaagtgccatcctggcacacgaacgtctttccattgtcgacccgcaaagtggcggacagccgttatactctcccgatcgtaaacaagtgctcgccgtcaacggtgagatttacaatcaccgtgatattcgcgctaaatatgcgggaaaatataactttcagaccggaagtgactgtgaggtaattcttgccctttacaaagataaaggcatccattttctggaagatattagcggtatctttgctttcgttctttatgatgaggaaaaggatgaatttctaattgcccgtgatccgataggggttattcctttatatataggaaaagataaagagggaaaaatctacttcggcagcgagttgaaagcccttgaaggattttgcgacgaatatgaaatatttctccccggacattacttctatagtaaagagggaaaaatgaaacgttggtattcgcgcgactggacagaatatgaaaccgtaaaagagaatgatgcacaaaccgttgatgtgaaaatagcattagaagaggctgtacaccgccagttaatgagtgacgtaccgtacggagtgcttctttcgggcgggttggatagttctgtcatctccgccattgccaaaaaatatgcggcaaagcgtatagaaacagacggagcgagtgatgcgtggtggcctcaactccactccttcgccatcggactaaaaggtgctcccgatttgattaaagcacgtgaagtggctgaatatatcggtactgtccatcacgaaataaactatactgttcaggaaggtttggatgccctgcgtgatgtcatttatttcatcgagacatacgatgtaaccacggtacgcgcttccactcccatgtacctactggcacgtgtcatcaaatcgatgggtatcaaaatggtgttgagcggtgaaggcgccgatgaagttttcggtggttatctgtatttccacaaggctcccactccacaggcattccacgaagaaacagtacgtaaactttcaaagttgcacatgtacgattgcctccgcgccaataaaagtttgtcagcatggggagtagaaggacgtgttcctttccttgataaagaattcctcgacgtagccatgaacctgaatccgaaagctaaaatgtgccccggaaaaaacatcgagaaacgaattgttcgcgaagcctttgccgagatgttaccggaaagtgtggcgtggagacaaaaagagcagttcagtgacggtgtaggatattcatggattgacacattgagggaaatcacagctgctgctgtgagcgatcagcaaatggaacatgctgccgaacgcttccctatcaacacgccacaaaataaagaagaatactattatcgcagtatctttgaagagcatttccccagtgaaagtgcagcacgcaccgtacccagtgttcccagtgtggcctgctccacagcagaagcgctggcgtgggatattgctttcaggaatctgaatgagcctagcggacgtgcggtgagaggaatacacgaagaggcctatacttaactgataagaataacagaatctgctctttctgttattcttttgtaacatttctattttaaaatctcaaggattaacgcagattagcatattattgtctgatttgcgttttcttttttataattttgaggccaaaccaaattaaatctatcaaacttttaaaagaccaaacaaatgaatttaaaaaaaatgatgatggcttctgcccttctaatggttgcttgctgtatgcaggcacagacaaaagtgatagcccaccgtggattctggaaaactccgggatcatcacaaaacagtatttcatcacttctaaaagcagattccatcggttgttacggttcagaatttgacgtatggatcgctaaggataacaagttggtggtcaaccatgatcccgtatacaagatgagaccgatggagtattccaaaggtgacgcactgaccggacttaaattatccaacggagaaaacttacccagcctggaacaatatctggaagccgggcaaaactgtaatacccgactgattctcgaactgaaagcacatagtaacaagaaacgtgaaaccaaagccgtacagggaatccttgccatggtgaagaaaatgggactggaaaaccgcatggaatatatcacgttctccctgcatgccatgaaagagtttatccgcctggctcctgccggtactccggtattttaccttaacggggaactgtctcccaaagaattaaaggaactcggtgctgccggtcttgattatcacatgggagtgattaagaaacaccccgaatggatcaaagaagctcatgaactcggcttgaaagtaaatgtgtggactgtggacgaagtggaagatatgaaatcgctgatcgaacagaaagtagatttcattaccaccaacgaaccagtcatcttacaagaagaactgaaaaaacatcaataagataaaatcattacaaagtaaactattttaatatccgtctttaaagaaacagctcgttcctttaaaagaaacaggatgtttctcggtgtcgaacgaggttgtgtcaaaacgttggcacaacctcttttacctcaaatccgcaactacgcgcctaatatgatacagaagcgaaaagaatctgcatcgttagtaaaaagggggcacagtgcatcgaatgtcaccataaagacatataaatgccccttaccccaccatgcgacttgaggcaatacgcaaaatcacgactataagttgtcggtgttatccaaagtcattctggaacacattggcataagcattgttgcatgaatagatattcagcacatacttccttgatgtcctgacccatttggctggcacagagatgaacttaaagacaaacgtcttgatgcggcttgttgctttgagtccgaacctcttcacgtcaagcctcgccatgatgaatttatagaagttgcgtatgagtgccataagcagaagaaacaccgtgttttctcccataaaggattttggaagcctgttccagccgaatccgttattcatatcatcgaagatgcgttccttccctccacggaggttatagaattcgacaatctctttctcggaagactcgtagtcatttgtaaggatgcagcggtaggtgtattctccttcccacaggtcgagttcgccgtctatccgcttctgtctttgaatcacaagacggtatgccttccctttccatttctcgatgagaatggaggccagctcaaactcaatgccgcccaattccactttcttccaacctctgagggcaaagatgtcattgtagagcgaactgcatcggttagcacggatatagaaggtcttgcagtgtttagcaatctcttccactatctcttcagaacacgagccgcaatcagctctgaaacggttgataataagcttgttttgttcaaacctttcaaagaacctcttcagcgtgtccttctggtggaaacggacatttgtgttgccgtcgctgttctcaatgccgacaatcaagttgccaataaccgccacgccagggcgataaccaaggaacttcttgtatgtaggcttcgcatcaaacttctcagcctctatgaactggtggtcgaagtcaacgtcatacccctcgccctctttcagctgccctgtggacaataggcaattgaggagcagtgtattcagcttgtctgccgtgttgaagtcgtaggtcttgccagtgtcggatgtgtaggaaatgttatcctgggtcagttcctttatggctctaagaatcgtgtcggcactgcatgtgcgaagtgtcggatgaagcgaaaggtggtacatcagatgagtggtgacatcctcgatgcatgagccgccacaaaaataaacgctcataagcgaacggatgatttcgctgtattgataaccatacagcctgcatctcataccgagggttgagtcgattacagatgagagtctggagtcaaattgctccattattgaaaatattcctccaaaaggagtgagtttctcggatttaattgctacctttgccatgtctgtcgggtttgatacatattttgatttgcaacactaagataggtgaaaaatctgacatggcaaattcctgagcaactttttgttgctcaggtacttaaaaagttatatttgtaatagtgttgcggaattaaggttttatattttacagttctgctatattttcttttggctatgctgctttttcctcatgcatttggcaacaagttgctatattccaattatatcgggttataaatagtcccataaacatatatttggcaactgtaatgagcccctttccttcttttatcagtttagcacacatttttttgatattaaaggctatagcaaagaaagcaaagtccattgtaaccttgtcttctcccacatgccggaatcttctgtatgccatgttgtatttcatttgtccaaacacagcctctggttctatacacctcctgcctctatgcttgataccttcttctgagagcaacctttcccgtgcctgccgtttgtattgatttaatcggtggttgacttctataatacggttcccccgagctttaaaacaactgccacgcaaagggcaaccttcgcatctttttgctttataccgggcactttcgatgatgtatccgctcgctgtcttgtcacgtttggttcctatacggttcatgtgctgtcccataggacaaacgtaataatcctcttgggcattgtaatggagactttcggcatggaatgggttgggagtataacgaggacgctgttctttatggaagtaattgtacttgatgaaggcttctatcccattctcctgcatgaaccggtaattttcttccgaaccgtaaccggagtctgccacacagatattcggtaaacggttatagcggtactggaaagagtggaaaaaaggtatgagggtcagtgtatcggtagggttgggaaacagacggaagtctgtgatgaattggttttcagtacctatttgcagattatatccgggtttggtctgcccgttcttcatggcatcttctttcatgcgcatgaatgtggcaccaggatcggtcttggaataggagttacgttctccaagggtatcaaggtgattgtcgtattctatcagcttgtcacgatacccttcaagttccatgacctgcttcttctttttgcgcagggctttcttttcttccttatcctttgttgcaggctggcgttccagggcttctttaagttcatccactatgtcagagagcctgcagggagtaaactccacggatgtgtcttttatagagttctcctgtgcaatggcttcatccacctgttccaagagaatacggattttatccattagtctcgtacggttccgttcgactgtcttgcgccagacaaaagtatatttgttggctttggattcaatcttggtgccgtcgatatactccacatcaaggctgatgaaacctttatcggcaaggacaagaaccaactgggtaaatacattatttatttcctcctttacacggttacgaaaacggttgatcgtgataaaatccggatgctcattaccggcaagccaaatataatgaatgtcacgaaggaggtgcttctctattttacggcaagaatagatattattcatgtaggcgtagattatcaccttaagcatcattttaggatgataaggacaacggcccgtttccttataaagcttcttgaaactctcaagattgagattgtcaataacagcattcacgatgcggaccgggtcggtcgcagctatgttttcatcaattctttgtggaaaaagaacggtttggttgggaatgtaaggacgaaaatgtaactttgccataacgaaaaactttatacctaaagatacgaaaactttgggtaataacaaagcccgggcttgagaaagtctgggctttgcgcataaaaaaaggctgtgtcagcgttttgacacaacctcgtttcttttaaaggaaaaatgagcttttataacaaactaaataccagcatattaagaacactcattttttcatctgaaaaagaaagggtcattttcatatatgccaataaaagattacaaacgatttactggaaatcatctaatacctctttcagctctcctaccgtaagctctcctacctgtctccataattcatgtcccttatgcaataaaagaaaggcgggcactgtttctacattatgcgcatcggctattgttctattttcttcagcattcactcttatcaattctacagttctcttttcgtaagtccgaagcacaggacctatccactcataatgaggtgaccagtcggcataaaatactaccaacaccaaatggttggtcttaactgctgtttctaattgtttctctatattcatatctctacgtttttatattaatgatagtgctaaaacaatgaatacagaaaaaggttcttcagcatatccggtgagcaatatgatagataaataggggttttcactttcatatcgtcaaaaggaaaaggatatatttcttgtttttatagctgatttcactgattatcaaggctaaatatttttcatatattatggaagaatatgcaaaacaattcatccaaataacagtttattaatatataaacaggtataatttcaaattataactaaatgtggccgtatataaagcgattataagtttgaagaaaataaatagatattagatatactttttagtaaaatataaagcaaaaagtcatatctttgcatcgtaataaaacaaaaggttacaacaatcaacaaatataaatcaaaatgacaacaaagattaagttcacaaaaatgcatggagcgggaaatgactacatatatgtagacacaagccaatatccgatagccgaccctgcaaagaaggcaatcgaatggagcaagtttcatacaggaatcggaagtgatggacttatattgattggtgtctctgataaagcggatttcagcatgcgcattttcaatgcggacggttcggaagctatgatgtgcggtaacggaagccgttgtgtaggcaaatatgtatatgaatacggcttgactgacaaaacagaaattacgctggatacacgatcaggaataaaaatcctgaaactgcatgtagagggaaaaacagttagtgcagtcaccgtagacatgggtagcccgttggaaacagaagagattcagtggggaggaaagtatcctttccggtcgaccaaagtatcaatgggtaatccgcatctcgtcacatttgttgaggacatcacccagattaatttaccggaaatcggtcctgaactggagaatcatcctctttttcccgacagaaccaatgtggagtttgcacagattgtcagcaaagacaccatacggatgagggtgtgggaaagaggatcgggaatcactcaagcttgcgggacaggtgcttgcgccacagcagtagccgccttcatcaacggacttacaggaagaaaaagcgatgtaatcatggatggagggacagtcaccattgaatgggatgaaatctccgggcatatattaatgaccggaccggcaaccaaagttttcgatggggagattgaggataagtattaaaaaagtattaagtatcaggtattgagtattagattttgcagaacttaaaacaataacaagatggcattagtaaacgaacattttttgaagttaccgggaagctatttattctcggacatagcgaaaaaggtaaataccttcaagataacacatcctaaacaggatattatccggttgggtatcggtgatgtcacccaaccgcttccgaaagcgtgtatcgaagccatgcacaaagcggtagaagagctggccagcaaggatacattccgcggatatggtcctgaacagggatatgattttctgattgaagcaattataaaaaatgactttattccacgtgggattcacttctcggcgtccgagatatttgtcagtgacggtgccaaaagcgataccggaaatataggcgatattcttcgccatgacaatagcgtaggtgttacagatcccatctatccggtttatatagacagcaatgtcatgtgcggacgcgccggagtgttggaagaagagacgggcaaatggagtaatgttacttatatgccttgcacaagtgagaacaactttattccggaaattccagacaaacggatagacattgtttatctctgctatccgaacaacccgacaggaacaaccttaaccaaaccggaactgaagaaatgggtggactatgcattggcaaacgatacattgattctgttcgatgccgcttatgaagcatatatccaggacgaaaatgtcccccactctatctatgagattaagggagctaaaaagtgtgcgatcgaattccgtagtttttcaaaaacggcaggatttaccggagtacgctgcggatataccgtggttccgaaagaactcaccgccgccactctggaaggcgaccgcataccgctcaacagattgtggaaccgccgccagtgcaccaagttcaacggtacttcttacattacccaacgggctgcagaagccgtttacagtgcagaaggcaaaatacagattaaagaaacaatcgactattatatgaccaacgcccaaattatgaaagagggattggaagccgcaggactgaaagtgtatggaggagtcaacgctccctacttatgggtgaaaactccgaacgggctttcgtcatggcgattcttcgaacagatgttgtatgaagccaatgtggtcggtacccccggtgtaggcttcggaccaagcggtgaaggatatatccggctaactgcatttggtgaacgcaacgactgtatcgaagcgatgagaagaataaaaaactggctataagaattttgaataacttctcctagtctattcataaccagtgatttttcaatttacttgatagtatttcgcgcgctactatatatacatggaccgtacatccacatttttctaactattaaaggtaaaaagacgatgaaaacgacgattaacaaaaaaatgagggtaataacagtagcattattactgtcagggcttgtcccgtctacaatgatggcacaagataaggtagaagcttccgttggagcagatctggtaagtggttacatctggcgcggccaggatttaggcggagtgagcgttcaaccctcactggaaatctcttacaaaggtttctcactcggagcatggggatcggtaggattcgaatcgacggacacaaaagagttcgatttaactcttggttattcgataggcggttttagcgtttcagtgacggattattggtttaatacccaagtagaaactggcatagacgatgatggagaaacgatctttgcaactaacaagtattttaaatacggagctcattcaacggctcatgtatttgaagcacaagtcggatatgacttcggaccactggcagtcaactggtatacaaattttgcaggtgccgacggcgtgaaagaaaatggcaaaagggcttattcttcttacctcgcacttagcgcaccattcaaattgggaggtctcgactggacagtagatttaggtatggttccttgggagacaactttctacaatggctatacaagtgggttctgcgtatcagacgtaagtctcggagcttccaaggatatcaaaatcacagattccttctccgttccggcatttgccaaggtatctgtcaatccacggacagaaggagcctacttcgcattcggattaagtttttaagagagagaatatagaatatcaaagagcgtatagggatcaggtagttagagtttagattttatcggtttgttgtatggtaacctactatggctgccacaccctatacctctttcttttacaggtcaacactaatatttaaggtatatgaaaaagattgaagctattatccgtaaaaccaaattcgaggacgtaaaagacgccctactcgaagcggacatcgaatggttctcttattacgatgtaagaggtattggaaaagcacggcaaggacgtatctaccgtggcgtagtatatgacaccagcaccattgaacgaattttgatctctattgtcgtacgcgacaaaaataccgagaaaacagtgcaggctatcatcaaagctgcacagaccggagaaatcggtgacggacgtattttcgtcattcctatcgaagacgctatccggatacgcactgccgaacgtggtgacatagccctctacaatgcagaacaagaacgttaatcggcagcggcaaggtgccgctcccaggtttccttgcggattataacgtttataaagaggtttacaacatcactaataaataataggtataaaataagataattattatggatacaaaatataaaagccatagcttcataaagttgtggatagccactactatattcattttgtgctgttttactactgatatgtcggcacaaaacgcagccgctgccgatacagttgcagcagttacagaaacaattaccgaagtcgttgcagctcctgccgaagaagcatcagcagctcccgatacggttggtgaattagctcttggattaaatactgtatggatgttgcttgcagcaatgctcgtattcttcatgcagccgggatttgcattagtagaagcaggttttaccagagtgaaaaatactgccaacattctgatgaagaactttgtagacttcatgttcggctctttactatactggtttatcggtttcggattgatgttcggcgcaggcggattcatcggaatgcctcacttctgcgacctttctttcattaataatggtttgccaaccgaaggattcctcatattccaaaccgtattctgtgcgacagcagctacaattgtatcaggagccatggcagaacgaacaaaattctccatgtatatagtctacaccatctttatcagtgtactgatttatccgatatccggtcactggacatggggcggaggctggctgatgaacggtgaagaaggttctttcatgatgagtcacttcggcactacattccatgactttgccggttctacagtcgttcactctgtaggtggatggattgctttggtaggtgctgccattcttggtccccgtatcggtaaatatggtaaagacggcaaatcaaaagctatcccaggccatagcctgactattgctgcactgggggtattcattctttggttcggatggttcggattcaaccccggttctcaattggcagcagcaaccgaagccgacgcaatcgctatttcccacgtattcctgacaacgaacctggctgcttgtgccggtggtttctttgctctgttggtgagctggatgaaatatggaaaaccatccctgtcattgacactgaatggtatcttggcaggtctggtaggtatcacagcaggatgtgacgcagtatctcccgcaggagcagccttgataggtgcgatatgtggtgtcgtaatgatattctccgttgacttcattgacaaggttttaaagatagacgatccggtaggtgcatcttccgtacatggtgtgtgtggttttttaggaacgattctcacaggtttgttctctaccagtgaaggtttattctatggatacggtttcggattcctcggtgcacaactattcggagcattggtagtaagtgcatgggcagcaggcatgggattcatcattttcaaaacgcttgataagattcacggacttcgcgttccggcacgtgtcgaagaagaaggtcttgacatttacgaacacggtgaatctgcttacaactaagttacttataattaaaagtaagtctactcatcagtaagtgaattaggctatatagattaaaaagatttatcccgggcgggcctgaccgccttcccgggaaccacacagagaaaattatttgctctaacatatttaacaacaaatcaaattaggtattatgtcaaaacttagattcagagtagtagagacagctttcaagaaaaaggctgttgaggtagcaacacctgccgaacgtccttcggaatacttcggcaagtatgtattcaacaaggaaaagatgttcaaataccttcccagtaaggtatacaatgcactgattgatgcaattgacaatggtgctccgctagatcgcagcattgccgacgaggtagctgccggcatgaaaaaatgggctatcgaaatgggtgtcactcattacacgcactggtttgcaccgctgaccgagggtacggcagaaaagcacgatgccttcgttgaacatgacggcaaaggtggtatgatggaagaatttacaggtaaactgctcgtacagcaggagccggatgcttcttctttcccgaatggcggtatccgtaatacattcgaagctcgcggatacagcgcatgggacccctcgtcacctgctttcatcgtggatgatacactttgcatcccgactgtatttatcgcatataccggtgaagctcttgactataaagctcccttactgaaggcattgcgtgctgtagataaagcagccgtagccgtatgtcagtattttaatccggaagtgaaaaaagtagttgcttacttaggatgggaacaggaatacttcctggtagacgaaggattgtatgccgcacgtccggacttactaatgaccggtcgtactttgatgggacatgacagtgccaaaaaccaacagttggaggatcactacttcggtgctatccccacccgcgtagccgctttcatgaaggaccttgaaattgaagcgttaaaattaggtattcctgttaagactcgtcacaacgaggttgccccgaaccagttcgagttggctcctatctttgaagagtgtaaccttgctaatgaccataacttactgattatgtcattaatgcgtaaggtaagccgccgtcatggtttccgtgtactgcttcatgaaaagccgttcaaaggtgtcaatggttcgggtaaacacaacaactggtctttgggcactgatacaggtatcttattgatgggaccgggcaagactccggaagacaatctgcgttttgttacattcgttgtcaatacattgatggcagtttatcatcataacggactactgaaagcttctatctccagtgctaccaatgcccaccgtctgggagcgaatgaggcacctcctgcaattatctcctctttccttggaaaacagttgtcgcaggtattggatcatatcgaaaacagtacgaaagatgatttaatcagccttagcggtaaacagggaatgaagttggatattccgcagattcctgaattactgatcgataatacagaccgtaaccgtacttctccatttgctttcacaggcaaccgctttgagttccgtgccgtaggttccgaagcaaactgtgcttctgccatgattgcattgaactcggccgtagcaaatcaattggtgaagtttaaaaaggacgtggatgcgttgattgaaaagggagaacccaaagtttccgccattcttgaaatcatccgcggatatatcaaagaatgtaaagccattcatttcgacggtaacggttacagtgacgaatggaagaaagaagctgcccgtcgtggactggattgcgaaaccagtgttcctgttatcttcgacaattacctgaaaccggaaacaattgccatgttcgaagctaccggtgtaatgaccaagaaagaactggaagcccgtaacgaggtgaaatgggaaacttatacgaagaagattcagattgaggcacgtgtattgggtgacttggcaatgaatcatatcattccggttgccactcaataccagacggacttaattaataatgtctataagatgcaatctcttttcccagcagaaaaggcagcgaaattgtctgctaagaacctggagcttattgaagagattgccgaccgtacagctttcatcaaggagcatgtagatgcaatgattgaggctcgtaaggttgcaaacaagatagaaagcgaacgggaaaaagccattgcctaccacgacacgattgtcccggcactggaagaaatccgttatcacatcgacaagttggaactgattgttgacaatcagatgtggacgcttccaaaatacagggaactgttatttgtgagatagaaaaaaaattatctatttcttttgttggttgttttaagtttgcggggaggggtgctgtgaagcagtcctcttcttttttttattcgataatctttgcgtcttcaatatcatcatcgtcatgcataaccggagccttcgggcggcgacgggcaaacttgaaccagtttatcaattcggaaagagaataaaccaaactgctgataccaataattataaatgcagtattacgcgctcctgtcggattgaacaaagcgataatacccgcaataagaatcagcgaaggaatcagataaaaagctcccggaacgggcatccaccgacgagccatcgacaaagaagcaatctgttgcactcctcccataatcaggataaatcccaataaaaacatcaggacatctgcaaagaattcaggcatcacaatcaaccaaagtccgaataataagctaccgattccttctatcggaaaacggggagctgcttcaccttccggtcttttccggccgaaatagccaaaaaggctgataacaccgggaatcaagaaggcaacacctaccgtaatgacaatataactggcagccgcattgggccaaatcacgagtaccaatccaatcacaagtgcgaagagaatgcgaataagggaataattcattgttttcataaattctatattttttaaccgagtctgttccaatacttttgcgaatataagtgtttctactgatatataaaaataacaaataaacattgtaataagttcgtaataatatcgttatgacgattacatctcacattgatatttttgcagaaattttaaacagttcctttttcacaatgaaacaaagcgaaataaaaaagaaatacccttatgtagagcgtgacatcagttggatgtacttcaaccaacgtattctgctagaagccgcccgtccagaagtgccactgctggaacgactcacttttcttggcatctattcaaataacctggatgaattcttccgtgtccgtgtagcgactctgaaccggatcgtagaatatgccgataaaaacatacaagcagaacaagaaaccgccgcctgcactctgaaacaaataggaaagctgcacaatcgttactacaagcagtttgaggagatattcgcttccattatggaggaattgaagaaagagaatatctacgtcatcaaagatgcggaaatgacggacgaacagaaagcattcgtcacttctttctatcgcaacaaactgaatggttctaccaatccgcttttcctcaatggaacccgcccgctggacgatcagacagatgaggatatttaccttgccatccgtctgctgcgcaaagatgaaacgggaaagataaaggagaaagactatgcagtgattgaactgccgaccggagacttcggccgttttattcaattacctgattcggatggaaaaacatatctcatgtttcttgatgacgtgatccgctattgtttgccgatgatttttgttggcatgaagtacacagattatgaggcgtacactttcaaattcactaaagacgccgaaatggaaattgacagtgatctgcggacaggggtacttcagaagatttccaaaggtgtgaaaagccggaagaaaggggaaccgatccgtttcgtctatgacgaacaaattcctaaagacttgctgaaaaagttgaccggccgcctgaacgtggataagaatgacacgcgtgtagccggaggacgctatcacaatttcaaggatttgatgaaatttccggtttgcggtcatcatgaactgaaatatcctgtttgggaacctatcttcaagcctgaactgaatggcatggaaagtctgctcactttgattcgtcggaaagatcgttccttacattatccttatcatagtttcgatactttcatccgtgtgttgcgagaagccgctatcagtaaagaagtaaaaagtatcaagatgacgctttatcgtttggctaaagactccaaagtgataaaggctttaatcagtgcagccaaaaacggaaaaaaagtcacagtagttatcgaactgttggcacgttttgatgaagcgtctaatatcaactggagcaagaaaatgcaggatgcggggattcatgttattttcggagtagagggtttgaaaattcattctaaattgctgcatatcggcactcggcacggagatatcgcctgcatcagtacaggaaatttccatgaaggaaatgcacgtatgtatactgactataccattatgactgctcaccgtcccattgtccgggaagtcaatgccgtattcgattttatcgaaaagccttatactcctgttgatttcaaagaattgctcgtttctcccaatgatatgcgtaaacgattcattgcgcttatcaacaaagagataaaaaataaggaacagggaaaagaggcttatatccttgctaaagtaaatcatattactgaccgtgcacttgttgaaaagctatacgaagcctcaacagcgggtgttcaagtggaactggtagtacgcggtaactgttctttagtgacaggcgttccgggtatcagcgagaatatacacatcaatggtattatcgaccgttatctcgaacattcgcgcattttcatcttcgccaatggtggagaagaaaaatactacattggttctgccgactggatgcctcgcaacctggataatcgtattgaggtggcggcaccggtctatgataaagaaatccaggcagatttaaaacgaattgtctgctacggattccgggatacggcaaaaggaagaattgtggatggtacaggcgagaaccgggaaaaagaacgggaagagaacagtgtcccattccgctcacaagaaaaattatataacgaatacaagaatacattatgataagtatgaagaaagttaattatgcggcaatagatataggctctaatgcggtgcgactgctgataaaatgtgtaaacgaggagaatgcgcccgaattaatgagtaaggtacagctcatccgtattccgttacggttgggagaagacgcctttactgtgggggttatctctacagaaaaagagaagaaactgattcggctgatgaaagcctacaaacaattaatgaagatatatgatgtggtagactatcgtgcgtgtgccacctctgccatgcgtgatgcacgtaatggcaaggatatcgttcagcagatcgtcaaaaagacgggtatccgtgtagaaatcatcgacgggcaggaagaagcgcatattgtttacgacaatcatatcgaacagttatttgcttcaggacaaaattacttgtatgtagatgtaggaggtggtagtacggaaattaatctcatcagcaacggtgaactgaaaaattcccgttcatataatataggtacggtacgtatgcttagcggtatggtaaaggaagaagaaaaggaagctttgcgcactgacctgatagggcttgccacagaatatacccctatcagcatcatcggttcgggaggaaatattaataagttatttcgtttagcggacaagaaagacaaaaaagcgtctctcctacccatcgaatcactgcaagatatatatgaaacattaaaagccctctctaccgaacaacgtattaagcaatataagttgaaaccggaccgggccgatgttattgttcctgctgcagagatatttctcgagatagctactcatgtaaaagctaccggaattattgtacctaccatcggactgtccgacggtattatagacagcttgtacacgcaaaacatgaacaggcctgattctccgcaatctcgatgaatgaatatataaaaaactcctgatactaagtctggatatactagtatcgggagtttttgtctcatcttgctataatgtatagattcatctttaaaagagttaggtattcggattttgttctttatatttgtgcaactatatatttgaaacaatatggatataaaacttagaattgagcaatcttcggattatcatgaaaccgaaaacattacacgggaagcattctggaatcattattctccgggatgtgacgaacattacctccttcatattatgcgtaaccatcctaagtttgtgccggagctcgatattgttgcagaacataataacaagattgtcggtaatgttgtctgcctcaaatcatttatcatggcagatgacggtaaccaatatgaggttttgagcctggggcccatttctgtcctccccgaataccaacagcaaggtatcggaggaagaatgattgcacttaccaaaaaattagcttccgaaatgggatttcgtgctattttactttgtggtgacccggattattatctccgacaaggattcattcctgccgaaacattagggattcgcactgaagacaatatgtatgctactgctcttcatgtttgtgaattatatgataatgctttagccaatgtaaaaggccgttatatagaagataaaatatatcagattgataaatctgctgctaatgagttcgacaagcgatttcctccaaaagaaattgtagttggtactccgtcacaaaaacggtttaatcagatagtagtgatgcagaaaaaagcgaattaaggttgaataacctaaatcgcctgatttgtacatctctggagctcggtcctgctatgatattaagcaactatcattcaatatagttaccattcttcgtatctttgcagttacaaaacattcaacatgagaaatttgaatttacaaaaagatactactgacactttgtaattcttaatctatcagggatcgcttctttcctccctttggctgaagtaaaatttttctgccactgtagagggctttattcaattcactattctacaattaagcatgatatatatacattttaatacgcgcacagcatttctacaatcaaacgggcatcacatgtactaataaagttcccttttacttttttctttttaccattatcaaagccccaaatagaaaaatcaatggaaagaaagtaggaaattctaacaacatttacgatatagcgacactatcccaatggtttgtttacttcatccatagcttttgatgacattatccgcatcttttacttactttatccttatgttttttacaaatatagcggcgcttttgatgtaaatatgcggtgctttacgcaataaaggcattgtttttcaataaatcatggggattttcctgctaatagagaagaatgatagaacatgagagatagcaaaacccttgattacacgaacaatcgtcagaataatcagagattctaaaactttatgtatttactttgtcatcgaatgggtaattacataaaaaaggggagcattaaggcagcacttacttcctacaatctccccataatcaatgcacacaagttcttttcgaataaaactgtttgcaatatttctctttaatagttttagtactgaatcactttatcactactaactgtcttataccaatcagtagttgagctctgatcgtgtgcccaatctgcaaatttagaatatgcgttcgttatcactgttgtttctgttggataagcaaatttatcaggaacacacaaagcccatgtattattaactgccttgattacctcaagcacctcattatccgccaattgtccattcgccgtagccgaattaaaatgagtcaaatggatttctgttctcttttgacctatcccctgataagcaatgaagaagtctaaaccatctgtcacactagggacggatatttcatttttaagtttgacgttcacttcaagagtatatatatctgtaagaggagtgctagcattcccagtattcaacatggggcgttgtgctcctgtatatccatatacataatgtgcgtctccaaataaaggaatcacaagttcattgccattggcttcataagatgcattttcaaatataccagaatttaatgagccggtacgttgagcagcgcctgcaccaaaacttatctcttccacattatttttgtctattcctcgtattctcaaaccagcacctaattgtttcacggcaccaactgcccgaaggtcaattttatattttagttctttcacatcattaccggctgcaggcaaagttacattcaacacaatatcattgaaatcgtaatctcctgctttcggatagttatcttcgaaagcataagaataaactgcatatcgaatttctacatcatccggtttttcatcagagttatacccttctttaacacagtcaccgtcagcaggaagtataaattctgctttgcccggattacaataggtagcaccttgctgtaatcccttatttactagccatgcaaaaggagaccagttataatgtgcttcgcctttatatgtttgatctgttatttcacaaatgatattattacttactttagaagcagattgagccagaccggaagtattatctatttcgtgaattcttaataaggcagttccttgtgtcggaccggtaactgttctgaataaattagctttgcccgtacaagtcaacatggattgtgcttccatcacgatattattatcatttccattacccgtcaattctttgcaaatagcttcggaagtatttcccataacaagcgtaccaaattgtaattttccagctttcagataacaaccgtttttaatattagtattattgttgccatctatattttcgacttcaatggttccatgatttatcaatgtcgtaccatttgtagaagcattataagaattcagtttaagtgttccataattcacaaaatcaactccgtttccacttccatcaattttcaaaaagtcacaatcaatcgtacccgcattatagtttgtacgcccagccgaactatttgttatctgaatacctctgtcaccaacaatacttcctccctgcatcacagttatataagaagcccgcgttaatatcagactcccatttttagcaatctctatctttccaccattctcaacgataatttctgtaatatcagaaaattgattactattctctataacccatgtgcttccttgaggaacgattactttcacagcacttatttctccatctctatttccagttgcactaaatccagctttaaaagttccttcctgaatcttaaaccaacgctcactttctgtaaaaacaggaaattgaccataacttccaccccagccagactttgcagaaagatcccaattagcctgaatgacagtagaaattgcctttttagcactaataaaatcggctgtataaggagcttccatgactggtatactagtcatcacagctcgtgatatagaacgtgttggcgtacctttgtctccaaagtgcgctgtcactgtaccattttcaatcgctgtcggttggaccagataacgtttgtgttcatctatacgcgcaacaaacactttatcaagagatgttgcgcaatccatcaccacatccaaagtcatactttgagtgacagttccttccgctaagagttttgctgtactttccgggcttaatggatcggcatcaaatatctgtatcttataatctactccttgatccccattgattgacacatgtgccgttacacttcgtgacattgtccaatcaccatcagagtcgatgttttttacaggaaaagtttcttcgtaaatttgtttcagttgatctgcattaaacagatttttctcattatcaacgcaactaataaaactgatagaagatactaacaacgaaaaagtgaagatttttacaatgctttgtttcataatctttaaatacttaagtttgctttatttgcacaaaaaataaaaatcattacgaatcaacaatcagcaatgaatgtacaaagatagttgtatttacaaataagaaacggataaagttgtatttttcgacctacggttaacatcttttaaaagataaggctttaattactcccaataaaaaacgacctattacattattgaatattaaaagcttagaagtacaaatatgcaatatgcaatcaaaaaaaagagttgcagattctatgcaactctcaattaaacgacaaagatccagtgttacaaagcactacaactacaaaaaaccgagctctttcatctccttattaaaaggataaaaattaaaaactaaaaggggaaaatcaatggtaatacaaaaatcatcacgattcccataataatctgcaacggcaatcccacttttacataatccataaaggtatattgaccggcaggcatcaccaaggcattaggcggtgtagagaacggagaagcaaaacacatacttgcacctaccgtcacagcaaacaagaaaggaaccggactgactccaatctgtatggcactttgcaaagcaatcggagcaagcaaaacagcggtagccgtattactaataaacatcgtcatcaacgaagttgtaaaataaatacctgccatcaatgcaaccggtccgtatgatcccaagccgttcaccaatgtgttggaaatatattccgaagctcccgttttctccaatgccagagacataggaagcatggctgcaatcaatacaatgctttcccagttaatcgttttataagccgcttctacattgcggaaacatcccgtgagcaccatcaatatacccgctatcataacagctgtaaccggagcaaccggaatgaagtcaaaaaccatcattgccaccattaacaccataatagcagctgccaccggagctttatagtctaacgtaactttagccgcttccgccaaaggttgtcccaaaacaacccaatcagaatcctctttgctaagacgggctatattattccatgttccttgcaccaaaagcacgtcaccactatgaatacgctcattccccaaatcttgcaataagtattcctttttacgacgaatccccaatacgttcacattaaatttatcacggaagccagcttctttaatggtctggtttatcaaattagaggatggcatcaatactatttcagcaataccgatatcataaaaatccagcgaattagtcgtactttttgtttcttccgttgcatggtcacctaaaatctctagcaggaaatcttctgcaaaaagctgtaccttatcaaattctcctgtcacatacaaaatatcctcggcttgcaacatcgtgtccggtgcagcaaacttctgggtaatcgttttcagaaaacgatgttgcgatgcatcaccacgacgcacttccatgatattcaaaccatatttgcgacgaatatccaagtcaataatcgtcttgcccaaaagccgggaatcttttattacctgcaaacgaaacagattgctggaaagcccatattcatttaccaactgtttcagtgacttacccgaacgtttattatcatctttctggccttttttagaaagaaaccatttgctaagtggcatcaataccagcgtaccgacaatcacacagacaatgccgacaggcaggaaagagaagaaggaaagcggttcaagtccggcagaagtcaacgtattttgtatcacaaggttcggcggagtaccgattaaagtcatcatacctcccatactacttgcaaaagccaacggcatcaacagcctgctcggattcataccggcactcattgccagactgacaacaataggaagcatcagtgccaccgttcctgtgttactgacaaacgcaccaatggccgaagtcaccaacatcaccaacagaaataaccggatctcactggttcccgcaagtttaagaatacgggaactaatcatctttgccaatcccgtttgaaagatagcccctcccactacaaacaatccgatcatcataatgactaccgaattggaaaaaccggaaagtgcttcatcaggagttaatatctgaaaaataagtaaggctatcagtgcacacagtgccacaatatccgaacgaaccttgccgttcacgaaaaagacagccgaaagaacgagaataataatggttattagcatacgtaattaaatgattgttttattttgactctatcaaaacttatttaggtgaacaaaaatagaaaatactccagcgttattaaaacaaactagaaatgattttagttcatgagacatcatttaatattttaatacattttctttctgaaaaaagactcgaaatcaagcaaaatatgataccatacaagaactacaagacaccatacctccactatttcttcatcgcatataattacagtctcacaatataatgttgaaagacaatatatttatgtattattttttgaaagttaaagaacaattcatatctttacacctcatttatatcaaacattttatggcaaacaattatttgttaaattattggattaacgaagttcattggggttataattatttactagtagttattttgctccttgtcatcagcatcttactatatagaatccgaaaattgcaaaaaacgattaaaaagaccaatcattcctaccgtttctcctttgatattctcgataaccttcctttccccatctttgtaaaagatattacaaacgatttccgatactattactggaataaagaatcagccgctcaatccggcattagcagtgaagaggccatcggacatactgattatgaaatttacggagaagaaagaggtgaaaaataccggcatatcgacaaagaactcatacaagcaggcaaagtatatcgcaaagaagagaaatacaccactcccgatggaatcacccatgatactattgccgttaaatctattatttcatgggaaggagaaaagaaatggctgttggcaacccggtgggatatcacacaactcaagaattatgaaagagaattagttgccgccaaggaagaactggaaaaagcattgaagaagcaaaaactagctctaaaaagtatcgacttcggccttatctatattgataaaaattaccgggtacaatgggaggaaacaagacaaatagccagcctggtaaaaggcagacgatacataccgggaaaaatttgctatcagaccagtgcacttcgtaatgaaccgtgtggacaatgtgctttcaagaaagctatcgaacagggcaaaattatccggcataccatcagagtagacgatgtagattttgaagtgaccgcaacacctgtattcggcgatgaaaaggaaactgaaattattggaggattacttcgttttgaaaacatcactgaaaaattaaagatggacaaaatgctgcaggaagcaaaggaaaaagccgaagaatccaatcggctcaaatctgcctttctcgctaatatgagccatgaaatacgaaccccgctaaatgcgattgtaggattctccgaaatggtttgccaaacggaggaagaggaagagagaaaagaatttgtaaaaatcatctccagcaacaatatcttattattgcaactaatagacgacatcctcgatctttctaaaattgaagccggtactatggaattcacatttgcacagactgatatcaacgaattgatggaaggtatttgcagacaaatgcaagaaaagaattcttccccagacattcaaatcttattcacagagaaagcagatcaatgcatgatgtataccgaccgcatacgtctatcacaggttatcatcaactttacaaataatgctttgaaattcacccctaaaggttctatcgaaatgggataccggattgaagaagccaaagatgaaatatacttttatgtaaaagatacaggtatcggaattcctgctgacaagatagataaagtgtttgagcgcttcgtcaaactgaactcctttattaaagggacaggactcggactagccatctgccgtgtcatagtagaaagactgggcggggttatcggagtggaatctaaagaaggagaaggctctcgcttctggttcagaattccaaggtcagagaaaattgagaaataataaaaagaaaagaggatattgtgaaaagtatgttccaatatcctctttatcctatatttttaatgtaagagtatacttaaagtgcagtctctaatatcctgcgggcaacagcacccgttacatttccattctctccatatttagcaccacgttcattgaatcggcgttcgatttccagaatagtatcctgtccgatgttctcttcatgcaaacgtgtagtcagcccaagcgaacgaaagaactcttcggtatgacaaatcgcttcatcaatccgttcttctcgcgtaccggaagtaattccccagactctttcaccatactgcaaaagtttatctcctttttcttcatgaagcacctgtaaagtggcaggaagaacaatggctaacgtatgaccatgtgtcaatccgtgcaaagcagtaatttcatgaccaatcatgtgagttgcccagtcttgcgacactcccatagcaataaatccattcaatgccattgtagccgaaagcataaaatcagccatcagttgataatcatgctggttttcacggattttcggagctatttctaccaaagtttgtaaaatgccttccgcccaacgatccataatgcggctctgcccgggagtagtcatatattgctccatcacatgaacaaaggtatcagccaaaccacaggccacctgatgaggaggcaaggtaaaagttacttccgggtcaagaatagagaagattggatagttagcataaaaaggatatttctcttttgtttcacgacgggaaataactgccccgttattcatctccgaaccggtagcgggcaaagtcaatacagtggcaagaggtacagtatgagtgactggacgtccggcaagtactaaatcccaggcatcaccatcatacaggattcctgcggaaatcaatttcgtaccgtcaataacggaaccaccaccaacagccagcagataatctactttctcttcttttcccaaagcaatagctttacggagagtttcaatggcaggattgggttcgattccccagaattctactgtaaaatgattcttcaatgcttcctttacctgatcgtacactccgtttttcttcacgcttccaccgccaaaagtaatcataatacgcttgtcggacggtatttctttagccaaccgagcaatcatcccttttcccattatcagtttcacgggattttgaaaaataaaattttccatatcttagtctattgttattattttggttattagccactatccttgcaaagatatatgatttatccgaaccctgtcagaatcaagcgaagaattgttgtgccacggaaggaaccatagccgacaaccagggtttcatatcctctgctaccaataaccaatacaataataatataatgaaaatggcaatagcgatacctactaaaacttttctctgtttcataattgtttttgtttaaatattcaatatttataagaacagttcaggttgaaaattgttctatatcagaaaaatgaaggcaaaagagaaaaaaagtcattttttgtttgctgtttcaaacaaagtgtctatatttgcccccataaaattacaaaagacaatgagaacaatgttagtaaatacatattggtggtggcacccgttacaactccgacagtcgtaagggagcagtgctcgtatgtatatacctcattaaagatataacagatttgaaagagccctgtcgcaacttgcggcagggctctttttatttgcccattttcgaacagatttagataataacataaaaaaatagataggattatgaaaagttttttagttgaccaggatggctattacggagaattcggtggtgcttatgtaccggaaatcctccacaaatgtgttgaggaactgacaaacaagtacctcgaagtgattgaaagcgaagagtttaaaaaggaatttgagcaattattacgcgactacgtaggacgcccttccccactctatctagcaaaacgcctttccgaaaagtatggttgcaagttgtatctgaaacgggaagacctgaatcataccggtgcacacaaaatcaacaacaccatcggacaaatcttgctggcacgccgcatgggaaagaaacgcatcatcgccgaaaccggagccggacaacatggagtagcaacagctaccgtatgtgcgttgatggatatggaatgtatcgtttatatgggaaagacggatgtagaacgccaacatatcaatgtggagaaaatgaaaatgctgggagctaccgttattcccgttacttccggaaacatgaccttgaaagacgcaaccaacgaagcgatccgcgactggtgttgccatcctgccgacacttattatattatcggctctaccgtaggccctcatccttatcctgatatggtggcacgcctgcaatctgttatcagcgaagaaataaaaaaacaactgcaagaaaaagaaggacgtgactatccggattatctgatagcctgcgttggaggaggaagtaatgctgccggaacgatttatcattatatcaatgatgaacgggtaggcatcattctggcggaagccggaggtaaaggaatagaaaccggaatgaccgccgccaccatccaactcggtaaaatgggaattatccacggagcgcgtacttacgtcatccaaaacgaagacggacagattgaagagccttactcgatttccgccggactggattatccgggcattggtccgatacacgccaatcttgccgcacaaagacgtgccaacgttttggcaatcaatgacgacgaagcaatagaagccgcttacgaactgactaaactcgaaggtattatccctgcactggaatccgcccatgcattaggagctttgagaaaattgaagttcaaaccggaagatatcgttgtattgactgtttcaggacgaggagacaaagatattgaaacctatttatcgtttaatgaacagcaataagtaattagtaaaccatcattcgtaatcaataatcaagcaattatagaaatgaaaacatttaattatacaactcatagcaaacaagtgctcggagatatgcatactcctgtcagcatttacctgaaagtgcgcgacatgtatccgcaatctgcattaatggaaagttccgactatcatgccggagaaaattccttgtcatttatagccctctgtcccctggcaagtatcggtataaatggcggcattgtcacttccaactatcccgataacagccgcacggaagaacccctgacaaaaaccttccatgtagaaaaggccatgaaccggtttatcaatcaattccaggtgaccggggataataagaatgtatgtggactttacggatacacgacgttcaacgctgtgaaatacttcgagcacatcccggtgaaagaaagtcacgatgagcaaaatgacgctccggatttgctatacatattatataagtatgtcattgttttcaatcatttcaaaaatgaattgacactcgttgaaatgttgtccgaaggagaagaaagcggcttaccggaactggaagcagccatcgaaaaccggaattatgcttcttacaacttctctgtaacaggtcccgttactagccctatcaccgacgaggagcataaagccaatgtccgcaaaggaatcgcgcactgtatgcgtggagatgttttccaaatcgtactttccagaagatttatccaaccttatgccggagatgatttcaaagtgtaccgcgcactccgcagcatcaatccttctccttatcttttctacttcgatttcggaggataccgcatcttcggttcttcaccggaaacacattgcaaaatcgaagatggtcgtgcttacatcgatccgattgccggaactacccgccgtaccggagatgtagtaaaagaccgggaactgacagaagctttattggctgaccctaaagaaaatgcagagcatgtcatgctggttgatcttgccagaaacgacctttcccgtaattgtcatgatgtacgcgtactattctataaggaaccacaatattatagtcatgtcattcacctggtaagccgtgtcagcggtatgttgaatgagggcgcagataaaataaaaacgtttattgatacgtttcctgccggcacattaagcggtgctcccaaagtacgcgctatgcagttaatcagcgaaatcgaaccacataatcgtggagcctatggtggctgtatcggttttatcggattgaacggcgaattaaatcaggctatcactatccgtacttttgtaagccgcaacaatgaactctggttccaagccggaggaggtattgtagcacgcagtcaggatgaatatgaactgcaagaggtgaacaacaaactgggagcactgaaaaaggcgattgatttagctgtcaaattaaaaaattgaaagcagagatagtatttgaacaaccattttacaatgacaataaaaatgaaaatattacttttagataactacgactctttcacttataacctactgcacgcagtgaaagaattaggggctacagatgtagaagtagttcgcaacgaccagatagagcttgatgaagtagaccgatttgataaaatcatcctgtctcccggaccgggcatacccgaagaggccggactgctattacctattattaaaagatatgctccgaccaaaagcattctgggtgtctgcctcggtcatcaagccatcggcgaagctttcggagcacgtctggaaaatctcaaagaagtatatcatggggtacagactccgattaccatccttcaccaggatttgctttttgaagggttgggaaaagaaatccctgttggaagataccattcctgggtagtcagccgggaaggttttcccgattgcctggaaataacggcagaaagtcaggaaggacaaatcatggcaatccgccataagacctacaatgtacatggtattcagttccatcccgaatcagtattaactccgcaaggaaaagaaattattaaaaacttcttaaacgattaaacttatgaaacagattctatacaaacttttcgaacatcaatatttgggacgcgatgaggctcgcaccattttacagaacatcgcacaaggaaaatataatgatgtacaggtagcctctttaattaccgtctttctgatgcgtaatatctctgtggaagaattatgcggtttccgcgatgcattgcttgaaatgcgtattccggttgatttaagtgaatttgctccgatagatatcgtaggaaccggaggtgatggaaaaaatacatttaatatttctacagcttcctgttttactgttgccggagccggtttcccggttgtgaaacatggtaattacggagcaacatcagtcagcggtgccagtaatgtaatggagcaacacggtgtaaagttcaccagtaacgtcgatcaactgcgccgtagcatggagaaatgtaatcttgcctatctgcatgctcctttattcaatccggcattaaaggcagttgctccggttcgtaaaggattggcagtgcgcactttctttaatatgctcggtccgttggttaatccggtattaccggcctatcagcttttaggagtttacaacctcccgttacttcgcctctatacctatacttatcaggaaagcaagacgaaatttgccgttgttcatagtctcgacggatatgacgaaatctctctgacaaatgagtttaaagtggcgaccagcgatcatgaaaagatttacgctcccgagagtctcggattctcccgctataaggaaactgacctggatggtggacaaacaccggaagatgcagctaagattttcgaccagatcatgaataacacggctacggaagctcaaaaaaatgtagtggtagtcaattcagctttcgccatccatgtgatttgtccggagaagactattgaagaatgtattgctctctccaaagagtcattggaaagtggacgcgcattagctaccctaaaaaaattcattgaattgaacagttaatgttttatttttgcaaatccatcatttacaattaataatcccacatcaatgaaagatatattatcagagattatagcaaacaaacgatttgaagttgacctgcaaaagcaggctatctccatcgagcaattacaggaaggtatcagcgaagttccgacctctcgttctatgaagcaggcattagcctcatctgcatcgggtattatcgctgaattcaagcgtcggtctccatccaaaggatggataaaggaagaagcatgcccggaagaaattgttccctcctatgcagcagcaggagcttctgccctttccatcctcaccgacgagaaatttttcggaggaagcctgaaggacatccgcactgcacgtcctttggtagagatccccattcttaggaaggacttcatcattgacgaataccagctttatcaagccaaaattatcggtgccgatgccgtacttcttatcgcagccgcattagaaccggagaaatgtaatgaacttgcagaaaaagctcatgaactaggtctggaagttcttctggagattcatagctccgaggaatcaatatacatcgacaagaaaatagatatggtaggaatcaacaatcgtaatctgggtactttcttcactgatgtagaaaactctttccgcttggccggacagcttccccaagatgctgtattggtatccgaaagcggcatctccgatccggaaatagtaaaccgacttcgggcagccggattccgtggattcctgatcggtgaaacatttatgaaaacacagcaaccgggagaaactttacagaatttcctgcaagcaatccaataaactaattattcaaaacggacagccctatgattaacggaaaaattatcaaagtatgcggtatgcgtgaagctgaaaacatacaggacgtagagtctatcgaaggcatagatatgctgggattcatcttctatcctaaatctccccgatatgtctacgagcttccggcttacttgcccattcatgcccggcgtgtcggagttttcgtcaacgaagacaagcagacaatcagcatgtatgctgatcgtttcggactgaattatgtacagctccacggaaatgaatcgccggaatactgccggtccttacattccactggattgaaaatcatcaaggccttttcagtagaccgtcccaaagatttgagaaaggtatatgactacgaaaaagtctgtgatctttttctgttcgataccaaatgcgaacaatatggtggttcgggaaatcaattcgactggagcatcctggatatgtacaatggacatgtacccttcctattgagcggaggcattaactcatacagtgccaatgccctgaaagagttcaagcatccccggcttgccggatacgatctcaacagccgttttgaattgaaaccgggagaaaaggatccggagcgtatccggacatttttaaacgaattaaaatcataatctaaaaattccaacgtcatgaatagaattaatcaacttttcaatagcaacaagaaagacatactttctatttatttttgtgccggtactcctactttggatggtaccgctgatataatccgcacgctcgaaaagcacggagtgagtatgattgaagtcggcattcctttcagtgatccgatggcagatggcattgttattcagaatgccgctacgcaggcattgcgcaatggtatgtctctaaaacttctttttgaacaattacgggatattcgcaaggacgtaaaaatcccacttgtgcttatgggatatttaaacccaatcatgcaattcggatttgagaatttctgccgtaaatgtgtggaatgtggtatcgacggcgtcattattcctgatctccctttccgtgattaccaagaacattatcgtatcattgccgaacgctataacatcagagtgattatgctcatcacaccggaaaccagcgaagaacgggtacgcgagatagatacacataccgacggatttatttatatggtttcatcagcagcaaccaccggagcgcaacaagatttcaacgaacaaaaacgggcttacttcaaaaagattgaaggtatgcatctgaacaatccgttgatggtgggatttggtatctccaataaagcaacattccaagctgcttgcgaacacgcttccggagctatcatcggcagtaagttcgtcactctgctcgaagaagaaaaagacccggaaaaggcgattaccagactgaaagaagccctgaagtaagagcctcggatgaaaatctccgcaggccgcagggctatttccgcaaaccgtggggctatttctgcaagccgtggggaggctgtacttcacccgtgggacgagcagagacaagccgtgagctgaacaaaaacaagacgtggactgaacaggatcgaggcgtgggctgacaatctcgttgcccctgtcattcaccgaatccgaagtccgaacaacaacagcagcagtcttcctttcctcgccaatattgctgctgttgtttacaacagtagtaatatttctcttctactctcttgggtttcattcggtttttgccctttatccatcggcgtttctgagtttttttccactgcactttttccactggtttttgcatactattaaccactgatttgctgtagtcattctttgcacacagatacagcaacaacacataaatccctacaagttgcactccccctgtctgatacatcatgacgctcaaattgtcgcctgcccaaaaacagatttctaacggaaaataccggtcatttttcattttctctttcgttttttatttaaagccggacacttcgtccaacctgccccaaagatggggacattttttcatactacatatcgcaaaaatgcaacatagatattttttatagtcttgtccttccaactttatataattcgtcatttaccactcattattcgcatttaatccgtatctttgccaatgttttaacagtaattcaacaattatgagagcagaaactccttccgttttgttaatttacacgggtgggactatcggaatgatagagaatccggaaacaggtgccttagaaaatttcaacttcgatcatttgcttaagcacgtccccgaactgaaaagattcaactaccgcatttcctcctaccaattcgatccccctctcgactcttcggacatggaacctgcttactgggcaaaactggtaaagatcatcaattacaattatgattatttcgatggtttcgtcatccttcacggaacagacacaatggcttacactgcctctgcactaagtttcatgctcgaaaatctaagcaaacctgtcatcctcacaggttcccagctcccgatcgggactttgcgcacagacggaaaggaaaacctcatcacagccatcgaaattgcagcagctaaaaatccggatggtacagccattgttccggaggtttgtattttctttgagaatcatttgatgcgtggcaaccgtaccaccaaaatcaatgcggagaatttcaatgctttccgctctttcaattatccgccattggcacgggtaggtatccacattaaatatgagcctaatctcattcgaaaaccagacccgacaaaaccgttaaagccgcattacctgtttgacaccaatgtagttattctaacgctttttccgggcattcaagagagtatcgtgacttctctgcttcatgttccgggattgaaagcggttgtcatgaaaaccttcggttcgggaaatgctccgcaaaaagaatggttcatccgccaactaaaggaagctaccgatcgtggaattatcattgtcaacattacacaatgtgcctccggagcagtagaaatgggacgttacgaaacaggaatgcatcttctggaagcaggtgtaatcagtggatatgacagtacccccgaatgtgccataacaaagctcatgtttttattgggacatggattacccaacaaggatatccgatataaaatgaactcctgcttaataggagaaatcaccaagtcttaagttaaatccatctattgtaaccccctgattttcattttaaacagttgtataaaagtgaaaatcaggggatttctcttcatcatcatcaagaccgaatcaaacctaaaagagccaaagaagaaccaaaacggaagtatagttgttttcactccataaaataacagaaaaaacatttccaataaaagatatgcagttatttttgtgatggatttggttacaaacaatcaagcaataatacattatgatgaagaaaacaattcaatttgtacccatcattgcaatagcgatggcaggtactatgtctagttgtgttgactctggaaaggatctctatgatccgtcttacgaaacacctaacccgatgggagatggctttgctgctcccgatgatatcgattggaacatgataaccactaaaaatgtctcggtcgaagtgaaagatgaagaaggaggactatttgcttatttagttgaaatatatgcagaagatcctttgactaatgaaagcgcttccgtgctcgctgcaaggacagctaataaagaaaacaactttaaatttacaaccgctgtcagtctgctgccaactcaaaagggtatttatgtgaagcaaaccgaccctagaggacgtgaacaggtatatcagttcgatgtgccggaaaacagcgataatattacctgtaaactctattatgcaggatctactgcacaaaatagagcgttgatgagtcgtgccgctgctacaagaggcctttcatttgaaaagccggattactattccatacctgctaatgcaaaagaagtgactgaaatgtcaggaaccactttgctgcgtgatgcttcttacaaaatcacctctgactatgccggcacattcaagtttgacggttatgacggtgaaattgcaaccaaagtttatgtagatgctaaatggacgattcccgcaacattccaattccaaaacggtattgaaatcattgtgatgaataatgctaaaattgaagcatcaggaaccatgacgttcattagaaactccatgttgaccattatggaaaagggagaagtgaatgcagaggatgtatcattcaccaatggagcgcctgctgcattaagaaactggggtgcactgactgtagcgaacacaatgacactacattccggtgcaacactctacaacaaaggaaccataaccagcaagaatatctcaatcaattccaatacgaaaattgtaaatgacaataaaatcagtttggaaggagaattaaatctgccgtctaatttctctttggaaaataacggagagatttatggagagaaattaattgcaaattccgacgctgttgctaccaacaacaacatcatgaagtttacaaccatcagtctcaccaatacgactgtcaacaacgcttgtagcatggaagcaacgacttctttctatgccaacggagcgacgtttaactttactcaaggatatttgaaagctcctaaaatggagtttgttaatggaacagtaaatttaagtgatggttctatgctggatgctacgacaagtatcagcatacctcccggttatgccaagttttatggaaaaggcgaaaatacttctatgataaaatcaccggttatcaccggacaaggtttcacatatgatggaaatttggttattgaatgtgatagccacgttgaaaagaaccaatggtgggaaaacttccatgtactgaatggcccatacttcaccaaaatgggagactctaaagtcatcatcgatgtttgtacaggaattaaaaatggtggaaatgaaggaggagatcctgaagatcctaagttcccgatcatcatggatgataatcgcaattatgcttatctgtttgaagaccaatggcctttatatggggattacgatatgaacgaccttgttctgattatcaaggaaagaaagatctccatcaataagagcaataaggcagaagagttcacgttaagtcttgatttatcggctgccggagctaccaagagtattggagctgctatcatgctggacggtgttcctgccagtgccattacgcagccggtggaattcagtgacaactctctttttaaaggtttcaatgtgaatagtaatctgattgagaacggacaggactatgcggttattccattatttgacgatgctcacaaagcattgggaagagaccgttacgaacagatcaatacgattgcaggtcactctgccaatacgagtcctaaaaatatcagtttcactataaagttcagcaatcctatctctgtggatgagcttaatatcaataaactgaatgttttcattttcgtagaaggaaacagaaaccagcgtaaggagattcatattgtcggttatcaaccaactaagttggcaaataccgacttgttcggaggcaacaacgacgatagttctacttcccgcaagagatattacatcagcaaagataacctggcatggggaatcatggttccgacagacttcaaatggcctttggaatatgtgaatatcaaatcagcttactcgttattcgaaagttgggtgaccagtggcggtactaagaatgaagaatggtggaaaacttttgattcatcaagagtatataaataagcctaacaattaatctttaacacggattccataaaaactggaatccgtgttttttcattaagatgctgtaagttgcaattaatagaaaaaaaagatatatcacgaattttactctcctgattggggattattctaaaataatatctatatttgcagtgtatcacaaatattatgtgacaacaatcttaatctataaatcaaataacaaagcaagcgatagaaaggtctattcgtatgaagaaaaaaatattactagtcgacgataaatcgacaatcggaaaagtggccggtgtgtatctaggaaaagagtatgattttacctatttggaagatcccatcaaagcaatagaatggcttaatgaaggcaatgtacctgacctcattatttcagacattcgtatgcctctcatgatgggggatgaattcttaagatacatgaagaacaatgaattattcaagtcaattcctatcgttatgttatccagtgaggaaagtacaacggaaagaatcagactattggaagaaggagcagaagactatatcctgaaaccattcaaccctttggaactcaaaatccgaatcaaaaagattattgactaataccgggtcttctacacatgcaatattttgtttatataggcagagatagcaaaacaatagaactactctcccgactaagtattggggtattctatgctgcacccaattgtagcaaagctgtcaaagtattggagaaaatacgcgaaaaatatgacgcagctctatttttcgaacaagtgaacatatccaaagatattgcagatatccaatacatgcataaaaagtatccggggctttatatggtactcgttatcgactccttatctaaggaagaagcatccgaataccttaaagccggtatcaacaatacgataaaatatgaaacaagccaggaggctttaaaagatttatcaactttccttaaacgaagaaaagatcagaaaataaaggcacttcaacttaaagcacaaaatataaatgctttccgcctgcctttatggaaaagaacctttgatattttcttttcaggaatggcgatattatgtctttctcctctcttaatatttactgcactagctatccggatagaaagtaagggtcctattatctacaaatccaagcgcgtaggaagtaattatcagatattcgactttcttaaattccgttcgatgtatactgatgcagacaagcatttaaaggatttcaatgcccttaaccaatatcagcaggaagatgaggatatttggggagaagaaccggaagcggaagtgaatgaagaaatcgatgaagaagaaatcctcttgatatctgacgatttcgtaatctccgaagaagactacataaacaagaagtccaaggaaaaaagcaatgctttcgttaagctggaaaatgaccctcgaataactaagattggacgtattatacgtaaatatagtattgacgagttaccccagcttattaatattttaaaaggggatatgtcaatagtaggcaaccgccctctcccactctatgaagccgagttgctgacaagcgatgaacacatcgaccgtttcatgggtccggccggattgaccggtttatggcaggtagagaaaagaggcgaagccggtaaactttctgctgaagaacgcaagcaattggatatcacctatgcaaagacattctctttctggttggatataaagattattctgaaaacagttactgcattcattcaaaaagagaacgtataatctccttccagatgatagactcttatatctacataatagatgatctggtattcttctgtacagggcttttgctcctatacctctttgtgatggccatagcctcacatttcaaacatatcacctacccgaaggctcaaaaggaatatggttgtgccattctcgttccggagggaagtattcttccggatgtgtataaagaagaagagtacgagtttatcacatacagcgatctatatcaggcaatcaacagtttagatcaggaacgatatgatctggttctcttcctgtccaatacagcatgcgctttatctccgcaattcctgaataagatatataatgcctatgatgccggtgtacaagccatccaactacatacgatagtagaaaaccgcaaaggcatccgtaatcgcttccgggctatacgtgaggaaataaaaaacagcctctgtagagccggcaatacacaattcggactgtcatccaatttattgggaactaatatggcaatcgacctaaaatggctgcaaaagaacatgaaaagttctaagactaatatcgaacgaaaattattccgacagaatatatacattgactacttgccggatgtgattgtttattgccagtccgcacccgcctgtccttaccgtaaacgtatccggaaaacaacttcctacttactcccttccatatttgaaggaaactggagtttctgcaaccggatcgtacaacaattaacgccttctccacttaaattatgtatcttcgtaagtatttggacttcgttgattaccgtatataattggaccttatcattcggatggtggattgcacttttcggtctattaatcacttatagcctggcaattcctgattatctggtagaggacaaaaagaagaaaaaacattcaatatggagaagaaaacacttaaacagcgaattaaagaaaaccccggcttaaaacaggctgtacatcgttttatcatgcaccccgttaaaactcgccctaattggtggatacggctcttcgatttcatatacctgaaacgcggaaagggttctgtcatctatcggagtgtacgcaaagacctccctcctttcaaccgattctctttgggtaaatattctgttgtcgaagacttctcttgtctgaataatgcagttggcgacttgacaatcggagattatacacgcatcggattgagaaacacaatcataggtccggttaatattggcaatcatgtcaacctggcacagaatgtaacggtcacaggactcaaccataattatcaggatgcagaaaagatgattgacgaacaaggtgtcagcacactgcctgttgtcatcgaagatgatgtatgggtaggtgccaattcggtcattctaccgggagtaactttagggaaacattgcgtagtggccgccggaagtgtagtcagtcattccgtcccaccctattcaatatgtgccggatgccctgcaagaatcataaaaacatacgatttcgagactaaagagtggaaaaaagtagagaaaacacctgctactaaccataaatagtgagaatagctacagaatatacctcataaaggtgattgtgacacattctgaaacgcattatctttgcagtatcagaattgaattaattagtcataattttattacgtagccacatttaagtaaaaaatgaaatagagtcccgccgaagcgatttcgtcgggattttgttttttattaccttaatccaatccacagacttaaatcccatataaataaaaaacgagctaattctttttatagaaccactcgccactgcatcagaaaagcctaaaggcttttccatagtacctcaaatttcctgaaaactaatcttctttttacctaaaaacgtcttacctattgttatccttttaccttctactaaaaacttatcctattgaactaaactaaaaaacttttaataccttaaactgtctaatctaataccttatttaatattttcttttaccttataaactaacagcaatttctcaactgctttgcaaaggtacgaatatttttcgtgtacgcaaacggttttatattttataacacttccgcaggctataaatctttcacatcgctcaatgcaaccagcttatttacaatagcatagatagtcaaaccggcagcactatgtatttgcaattttttgctaatatttcttcggtgtgtaatcactgtatgaatcgacaaaaaaagcttttccgctatttccttatttgtcattcccttcaccacacagatgacgatttccttttcccgctggctaagcgtatcctgattatccatctcttcttcttcggaaaccacattcaataaacctgcaattttcttagaaagagtttccaaatcatcgaatatcgaaatagactcatcatacttacccaataatgaagcatctacaaaagaagtaaccaacgctattaaacgtattcttttaccggatatttcttctcgaaacttagctacatcaaagtaatcaccaaaagtaggattgacaatcaacatctcgggacattgcgttcggacgcaatcgtgcaaagcttcaacagacagtaattctattggttgtacttttacgttagaaagacgcttcaatgcagcagtcaacccaccacgaataattacagaggtctctgcaatagctattcgaactacttcgttatttttcattttccctaatcctcctttccaaattcagaatagcaggaacaaaaatatagtcctcaaccttgcaatgagattccagtccggcttcgcaagcatatatgtcgaaaagagccgcgttcaaaagattttcatttgttttggcagggcaatatttaataatgatatttttcagttctgtcaatttctcccctacctgatcgtgatgcttggaaaatgtactgatctgatagtttttgggagcaactcctttaatcaatgaatcgacatacttaaatacggttttctcttcataatccatgtgcttacgcacctctcgtgtatattcatcgaaaaacttaaggatgagaaaagcaacatcgtcttgcgaacagtcgattgcctcgatcaatttacgacgaatagcgggaagagaaaaatccagaaaataaatatgtgcctgccgcagataatcaatcaatgcaggtatggaaatatcatctttatctccatcgagccgggaaaagccttcagccataaagttgactacaatcagaaaggtccggcagtctactccattcagttcacacacctccttgactgtcttgtcaccgaaccccaacgaaagcccaaaacgactcatcacttgcaacaaagaataattatcgctgatgagatcaatcatcttatcagttggcttatatttttgtaaattatccatcatacctatttatattagagactgcaaaggaacggaatattttgctgaaatacaatcatcatttataggtattttaattcgccggaaatagccaaatactaattatatgctactattttgtagcgtaactttaggcaagctagtctttttttagtaattttgtcgctatcaatttgtaattagtaactcgtaatttgtaattaataaaatggcaaacgaactcgaactgaaatacggctgcaaccctaatcaaaagcctgcccgtatcttcataaaagaaggcgaactccccatcgaagtattgaatggacgtcccggttatatcaatctattggatgcattcaacagttggcaactagtgaaagaactgaaagaagctaccggactgccggctgccgcttcttttaaacatgtcagccctgcaggtgctgctgttgcggtagaaatgagcgacacgctgaagaagatttattttgtcgatgacatgaaactatctccattggctacagcatacgcccgtgcacgtggagcagaccgtatgtcgtcttacggagactttatcgcattgtccgacacttgtgacgaagaaacagcacgcatcatcaaccgtgaagtatccgacggcgtcattgctcctgactatactcccgaagcactggagattctaaagaataaaagaaaaggaacctataatgtaataaagatagatcctgcataccgcccggctcctatcgaacataaagatgtattcggagtaactttcgaacaaggaagaaacgaattgaagatcgatgaaagtcttttgaaagagatgcctacgcagaacaaggaaatcccggctgatgcaaaacgcgacttaatcattgccttaatcactttaaaatatacacaatccaattctgtatgttatgccaaagacggacaggcaatcggtattggcgcaggccaacagtcacgtattcactgtacgcgcctggcaggaaataaagcagatatctggtatttacgccaacacccgaaagtgatgaacttgccatggattgaaaaaatccgtcgtgcagaccgtgacaatacgattgacgtttacatttcggaagattatgacgacgtactggcagacggtatctggcaacagttcttcactgaaaagcctgaaatactgacacgcgaagaaaaacgggcatggttggatacgatgacaggcgtagctttaggatcagatgcattcttcccattcggagataatatagaacgcgcacacaagagtggcgtcagctatattgcacaaccgggcggatcagtacgtgacgatcatgtgattggaacttgcgacaaatacaatatggcaatggcatttacaggcatccgcttgttccaccattaaaaagatcgaccattttttattccatatatccccatttataatgagaaggagacaaatcttccattataaatggggatttcctatttctttaagaccctctatctttgcagcgttacatttaaaaacgaatcaaagatgaataaaattggtgtattttatggttccacaacaggaacaacagaagaccttgcccgtcgaattgcagagaaattagatgtaccatcggcagatgtatttgatgtatccaagctaacagaggcattagtcaatgaatatgatgtattggtgctcggctcttccacatggggagcaggcgaacttcaagatgactggtacgatggagtaaaagttttaaagaagtgtgatttatcccacaaatctgtagccctgttcggttgcggcgactctgactcgtatagcgacacattctgtgacgcaataggtattctttatgaagatctgaaagatacccactgcaaattctgtggagcaacagatactgcaggctataccttcgattcttccattgccgtcgtagacggtaagtttgtaggtcttccacttgacgaagtcaacgaagatagcaaaacagacgaacgtatcagcgcatgggccgaacaagtgaaacaagaaattagctaattttaccttaacataaaaagaatactttgcatcatggcaactgaaagaatcatccccggcgaaatccgaatttttcttaatcatatttatgagtttaagaaaggcgtacgcaacatggtactttacacaatgagtaaagagcacgaagaatttgccatccgccgattgaaaaatcaaaagatcagttatatgatacaggaagtaggtaccaataaaatcaacctgttttttggaaaggcagaatgtatggaagccatgcggcacatcatcatccgtcctttaaaccaactgactgctgaagaagattttattttaggagccatgctgggatatgacctttgccagcaatgcaaacgatattgcagtaaaaaagaaggtataaagatggcagtttaagcgataaccttagcataagtttagctttgtttgtatgtagtttgtctgagttgaatcgtttctgaaaaggtagtttcctgatggtagatatactcaaggaaactggttgtagaagaaacgattcgctcaattacaaacaaaatcggtgacactatgaaataataaagacaactctacacactaacaacagacaaaggtgtatatcagtaaaaattatcatactgaaatacacctttgtctgttttattttatctactactatattttttttactctttagattaaaattacctacatatactgaatttaagaaacaactatgcctaatattaggtattgccacattttttaacctaatctaactttgcagccgataaaattattaaaaagatgagaaaaataacagcaatcgttattcttagtctcctaccttctcttacaattccagcacaggagacaaaagaaatttccaaaagtagtaattcttcttctacagaagaatatacaaaattccgttttggaggatacggtgaaatggtcgctaattttaaagattatggcatcaaccgtttctatggaggaaacgatggtaatccaaagaaaaacaggaataccatttcaattccccgtttcgttttagcttttgattataagttcaattccaaatggatactcggtgcagagattgagttcgaatctggtggaacaggtacagctttcgaattagaaaacaccgaaaacggtgaatacgaaacagaagttgaaaaaggaggtgaagtagctatcgaacaatttcacatcacacgtttaattcaccgctccctcaatgtacgtgccggacatattattgttccggtaggattgactaacgcacaccatgaaccgatcaatttcttcggaacttcacgcccggaaggtgaaacaagccttttgccttctacctggcatgaaaatggtctggaaatctttggttctttcggaaaagggtatgcaagcttcgattaccaagctatggtggtagcaggcctgaaccctaatggattcgatcgtaacacatgggtaggtagtggcaaacagggaatctttgaggaagacaacttcacttctcccgcgtatgtatttcgtttagattataaaggagttcccggtttacgtgtaggtgcatcattttattattgtgcagatgcaggagccaactctgataaagaacagacttatgcaaactatggaaaaattccgataagaatcttcaccgcagatgcacagtatcgcaataaatatgtaacggcacgcggtaatatcttatatggaaatttaggaaattcattaggagtaagtcaggcaaatgtcaaattatccaataaatcgccttacagccgtctggctccggtagcgaagaatgccgtaagttatgcagcagaagccggcattaatatccgctcggtcttcggaggcaataaaaagattccggtaatctatccatttgcccgctatgaatactacaacccacaagagaaaggggaaaaagggcaaacgatggaaaaacgttgccaagtaagtatgtggacagcgggattaaattggtacgctttgccaaacttagtgataaaagcagactatgcaacccgccagattggtacaaataaagtttttggcgtatcaaagtcatacaacagtgaaaacgaattttctattggaattgcctatataggatggtttattaagaaataacaaataatcaattatttaatttttatatgatgaaaacaaaattcttttatgtcgcagccctaatattgggattagcattcacaacaacttcttgcagcagtgatgatgacaacccaacagtagatcctgccaatattgattacactcctgaaaacgcatcaagctggcataactacatgagaaatgtagcagcacttctaaaaacagatgcaaccaatctctacaacgcatggaattcaagctataaaggaggtgaaagctatgcttccctgttcaaggctcatagtggctctccttacgcaagcgccttgagctgtgtggaagaaatcgtggataaatgcgcggaaattgccaatgaagtcggtactgccaaaattggtgacccatacaacttgtataaagccggaaatactgaagaagcattatatgctgtggaatcctggtacagctggcattctcgtgatgactataccaataacatttattccatccggaatgcatattacggttctttagacggtaatataaatgctaattctttatctactgttatcgccggtgctaattcatcattagataccaagataaagaatgctatccaaaaagcggcaaaagccattcaggatattccgcaacctttccgtaatcatattcccagtaacgaaacggtagcagctatggatgcttgtgcagagctggaaagtatactgaagaatgacttaaaatcctatattgcaaataatagcaacaatatcaatacggacgcagtacttaatcctgtagtaacacaatatgtagatgcagtagtagtgcctacctacaaaagtttgaaagaaaaaaatgacgctctctacaatgcagtaatagtccttgcagacaatccgtcaaatagtgcttttgaaacagcttgtgatgcttggatcactgcccgtgaaccatgggaaaagagcgaagctttcttattcggtccggtagacgaaatgggacttgatcctaacatggacagctggcctttggatcagaatgctattgtacaaatactgaattctcaaagttggagtgatctcgaatggagtgaaggtgatgatgaagctgctgtcgaatcggcacaaaatgtacgcggtttccacacattggaattccttctctacaaaaacggtgaaccacgtaaagtacaataaagctttatcttagctaagatattattgagaagtaaaggttggaattcaatgatccacctttacttctttggtatgtttaaaacatattattgaaacaaagtcaataaacaatgaatcactttctaaaatattcattctctttcttttgcctgttggcatgctctgcctgtgatgatgacggaattgacatattggatatcgagattccggagggctatgctctatcagccggaacatcaactattttcttgaattcgtctgttgcttatgacacgcctgcagattggataacaggagcatacgatgtacgtttcacccgaggtgacagactatatgacgatgtacgtacaagtaacaacggtcatggcggcggacttggtcccgtttatgccggttattcgtgcggcagttgccaccggaatgcgggacgtaccaaaccctctttatggacagagggtggatcgggcagctatggattctcttccatgctagtctacatatcccgtaaaaacggagctttctttcaagattatggacgtgtgcttcatgaccaggcaatctatggagtgcaaccggaaggcaaactgtctgtggaatacacttacgagacattttctttccctgatggagaagcctacacactttgcaaacccaattatactatatctgaatggtatgccgaagaaatcaaaccggaagatttgttttgtaccgtacgtattccattacgccatgtaggcatggggcaaatgatggcactagatcctgttgaaattgaagcacttgcagcaaaaagtaattatcccgaatatggaatcagcggacgatgtaattacatcaccgaacgcggagtgagaagtctgggattgtccggcaacaaagctcaacatgccgatttaactgtagaattgggattctccagtgatatgggcgttaccaacagccgctatccggaagaaatctgtgaaggacaaatacaagtaaaccaaggtagcatgatggggctttcttacgaccaactggatgtcagcacagaagagatggaaaacgtagatctctatatgcaaagtcttggtgttcccgcccggcgtaatgtaaacgatccgcaagtaatcaaaggggaacagaacttctataaagccaaatgtcatctctgtcatgtgaccactttacacactaagacacgtggtagtgttttattaaataatactcaactcccgtggttaggcggtcaaacgattcacccttattctgattatctattacatgatatgggttctgaaattatgggagtcggactgaacgacaactatataagcgggctggcacgtggaaacgaatggcgtactacccctctttggggaatcggcttacaagaaaaggtcaacggacatacttatttcttgcatgacggacgtgcccgcaatctgacagaagccatcatgtggcatggcggagaaggagaagcatcaaagaacttatttaagaatatgagtaaggaagaccgggatgcgctgattgcatttttaaattcactttaaactaaaagtagtatatataaagtaattatgaagagatttataatcattgccatgctgactgccataatgcctttggccgctatggcacaacatgaagaagatacagaaaatggtgtagtatcattagctggaagagaaggattcactatcgaaaccaagaaaggagattttgtattcaaaccctatttgctcgtacagaccagtgcaaacttcaattggtacgacgatgaaggactggataaagcatacaatcaagataacatagccaactccggattttcagttccttacgccgtactcggattcaccggaaaggctttcgataaagtatctttcaacctttccataaatgcggcagccagtggaggcgcattacttcaacaagcctggtttgatgttcaactgaaaaagcagtttgccatccgggtcggtaaattcaaaactccgttttcacatgcctacctgacaacactgggagaaacattgttacctagtttgccagtatcactgactgctcccgttatcctcccctattctttgaatgcggtaacacccaatattggcaccggattcgatttaggtgtagagattcacggtttggtagctgataaattcgggtatgaaatcggtttattcaacggtacgggtgcagcggtaaatacagcaacaaaaacatttagtgatgactggcacattccgtctttactgtacgccggacgtttcacctatatgcctaaaggagtgatgcccgctacacagggaaatccgaacaggctgaatgaagacaaaatcatgtttggtatttctacctctatcaatgtagaaagtgaaaatgaaagtaccaatgattatcgtgccggattggagtttgcaatgctaaagaacaaactttacctgggtgctgaagtctattatatgaatgttggcttcacaaaaagacaaaagatttccgagtcatataattacctgggcggctatgtacaaggtggttacttcgttgccccccgtctgcaagcagctgcacgctatgatttcttcaaccgtaacggaatggacaccaatggttttctaaatatgccagccgtgggtatgaactattttttcaagaactgtaatctgaagttacaagcgatgtaccagtatattgcccgtaaaggtcatgatacccaacttgatcgggataacgacgatttaggtttggcagtacattcggccagtattctactccagtatacattctaaatagcacaagaaaggatttgtttatgaaaaaatatattcttttcggaggttatctactgttattggcatacatcacatcatgcgatgacggacgtatttacgaaaagacagagaccctatcagaagaaggacgcacgctgaagatgagcggtaagatcaatggtatcagtaaatggcccgatggttatagtgttgtagtggcaggcttcagtgatgagagcgagtatgccgttgtcaccaaaacaattccggcggtcgaagatgatgagatccaggttacgatgacaggagtcagtgataaagtaaccactattgaattgtgcgttattaataaattgagaaaacgagttatcagttttcagtcaatggacgaccttacagcagttgacgacaccatccttatggatgtgggaactgtaaatgtaggtatgtaccatggtattcaagaaaaagtatttaatacgacatgcgcacactgtcatggtggaggtagttcggcagcagccaacctgtatctgacagaaggcaaaagttacgaggcactggtcaaccgcccgtcgaagaaagtagatggcatgttactcgtcaagccgggcagtgcgcaagaaagcgtattgcacacattattgaataccactattagttcaacctggggatacgatcactcaaaagaaatagtatcatctccgattttgacccttattgacgactggatcaataacggtgcgcaagaataaatagttatttacccaactgatatgaacaacaaaaaacaacagaatattcagtctgaaaagacgctaacagagatttttaaatataatgcaggaggagaagcttcagagtatcatattatcattcattctactaaaccggaagatacatacgaagaacagctgaatgcagtattaaacacctacgattatttacttacccaagaattgaaaggagcagttgccatcctcaaacgttatttccttagtgacgctgccaatcaggcagatacactactggcattgacaaccgaaggttcggactgcgcactttccattgtggaacagcccccgctggacggaacaaaaatagccttatggatttacctgttgacagatgtacagacacaagtcttacataacgggctttttgaggtgaaacacagtgcctatcgccacttctggggcggtagtgcattcaatcgtgccgccaattcggaataccagacccgtctattattgaacgactatgtgatgcaactcctggaacaaggttgtaaactggcagacaattgtatccgtacatggtttttcgtgcaaaatgtagatgtgaattatgccggagtagtgaaagcacgtaatgaagttttcgtcacccaaaacctgacagaaaaaacacattatatttccagcacaggcatcgacggccggcatgccgacccgaaagtactggtacaaatggatacttacgctgtagcaggaatgcaaccggaacagattcatttcctctatgctcctacccatctgaacccaacttatgaatatggagtaagctttgaacgtggcacgtatgtagattatggagaccgccgacaggtatttatttcaggaacggcaagtatcaacaacaaaggcgatgtggtatatcccggcaacatccgcaaacagacagaacgaatgtgggagaatgtggaaaccctgttgaaagaagcggactgcacatttgaagatttgggacaaatgattgtatatctgcgtgacatagccgactatacagttgttaaagcaatgtatgacaaacgtttcccacatactcctaaagtatttgttcatgctccggtatgccgtcccggatggttgattgagatggaatgtatgggagtgaaagaatgtaagaacaaggaatacgctccattttaatatcataaaagattatacagttgaaaaggttacttattatcttatatatctgtctggtgggactactcgctgtgactactttcgtagaacaagcgtatgggacagattttgtagaaagaaatatatatcatacatgttggttttgttgtttgtggggaacaattgccaccattgcacttgttgctctcatccgacgcgctttatggcgacggttccccatattgttgtttcatggctctctcctcgttatcttggtgggggccatgattacgtttatcggaagcaaaaaaggatacgtacacttgcttccgggggcaacgatagacagtttcctggaatcggaaagcggcagaaaagctgatctgccattcacaatacaactagatagtttccgtatagcatactatcccggaacagaagcaccggcagactacatcagctatatcacctactctcttcccggacagaaaaatgttctattacacgaacagatttcaatgaatcgtatatttacatcacaaggtttccgtttctatcagtcatctttcgatgatgacggaaaagggagctggctgactgtcaattatgatccatggggaacaggagtgacttatgcaggatatatcctgctcggtctctccatgatttggctactattttcccgcagtagtgatttccgacgcctgctaaaccacccgctacttaaaaaaggaggtgtatttatactgtttattttctgccttgcaggtaacatgcaagcacaaaaaaaactccttcctgcattgaaacaaacacaagcggacagtttagcacaggaacaggttatttatcacgaccgggtagtacctttcaacacattagcccgtgatttcattcagaaactgacaggagaagcttcatataaaggattgacacctgaacaagtgataggtggctggttactttatccggaagtgtggagaaatgagccattgatatacatcaaaaatacagaattacagcatttattaaacttacaaacaccttatgctcgattaactgatttatttgacggttctgtttaccgtctccgtgaacattggcaacgtgaacaaggacaacaaaacaaactcgccaaagcaatccaggaaacagatgaaaaagtaggcctgatcctgatgttggaaaaaggaacattcatccatccattacccactgatggcagcgtgcaacctctctccgaactggaagtgaaagcagaattactctacaaccggattccgttcagcaagattctttttatgataaatctgtcattgggagtgttgtctttcctgcttctacttcataacagcctgcaaagaaatatcctctcgcccaaagccaaaacgatttcccgcacagcaggaactttcttttctgttgcactctatcttgctttcatattccatttagcaggatattgcctgcgctggtacatcggcggtcgtattccacttagcaacggttacgaaaccatgcagtttatggctctttgtattcttttgatagcctgtctgctccatcgaagattttcatttatacttccattcggattcctcctctccggctttgctttgttggtttcctatctgggacaaatgaatccccagataaccccattaatgccggtgctcgtctctccatggctaagtattcatgtttcattgattatgatgtcttatgccctattggcattcatcatgctaaacggaatactggcattatgcctccggaaaaaagaatcggaaaacaatgtctccggaaacgacgctatacaagacaaccggatagaacagttgacgctagtcagccgcttgctgctctaccctgccaccttctttttaggagcaggcatctttctgggagcagtttgggcaaacgtttcctggggacgatactgggcgtgggacccgaaagaagtatgggcactgattacttttctggtatatggagtagccttccattcacaaagtctgcgcattttccgcaagcctctattcttccatatctatatgattcttgctttcctgaccgtcttaatgacctatttcggggtaaattatgttcttggagggatgcatagttatgcaaacgcctgaaccactatatatagctagtaattgatagaagaatacccattttaggggattgcgggaaaagcggaaagcccctatctttgcagtatcagaattaaattaattagtcataattatattacgtagccacattaaaaatacatagaaatcggccgaagtgattcacccgcatttcttttatttggttgttaagttgaaaaaccatataatgtattcattttggaatatgaatagatgacatattctaaaagaggcaaggacgtccggcttgtgaaagccggacgtttttttatatcagtaagagaataaagtgagagagctcatgcattcatgagctctttccaaccagccgtttcaaaagcgatatactccgctataaacttctccatctcttctttcttcacaggatgcaacaccagctcttcgagtagggcaaacaaccataccgtattcaggtgaataaagaagttagttattgctatattgatatgcggatatttctgcttcattccttgaaaaaaaacagaaatcgtacgcgtcatcaaatctgtatattcagaacggaagttctccaaaacagaaccttgtgcctgaaaaagcagcaaccgcaaacggtcacgatgttcagagaccaatctgatatattcccgtacagacattttctgataatccgaatccataaagacgtctatcgtcatctgatctgcatcgtgattataaatcatagcatacagatcattcaataccggtttcagaatcgtacggaatatctcatccttattggtgaaataatgatagatattactcaccgtcacccctgccctcgaagctatttcacgcatagaggcatccttgtatcccttttccagaaacacttcttcggctgccttcaagattccctcttgtatatctcctttcaaaaattgcatagtatcgttgctatttatcaattcatatttgtaacctgtctgttcaccatccgggcaaatataccatttttctttttcaattcctccggtgttcccatttcagcaacacttccattctccaatactacaattttgtcggcattggcaacggttcgcatacggtgcgcaataatcagcaccgttttgttacgtaccaattcagatatacccgcctgtatcttggtttcattctcaacatcaagcgaagccgtagcctcatccaacagaacaatcggagcatccttcaacaaagcgcgggcaatggaaatacgctgacgctcaccgccggataatgtttctccattctcaccgataatcgtctggtatccctgcggcattttagtgacaaactcatcacattgtgccaagcgggcaactctccggacttcctcatccgtagcatcccgtttgccaatacggatattatccataatggaagcattgaaaagaactacatcctgaaagacaacggaatagtttttcaacaaagtttcaggatcaatccgactgatatcctgcccgccgagggtaatctttcccgactggatatcccagaaacgtgccgccaacctggccgccgtactcttgccactacccgaaggaccaaccaaagccgttttttcaccttgtcgggcaataaaagacaagttattcagaatttgttttccctgctcataagcaaagtctacctgtctgaattcgatatcataaccttgaggagtgaattcggtagtcccgttttgtaccggcaatgcttccatctcattcattctattgatacgcacatccaaatagaacaaagcggcaatattattcatcacctcactgaccggagcatacacacgcgacccgataaccataaatataagataggtaaacaaatcaaccgtacccgaagccaagagattggcaccaacgataataacgcttgccagtccgagtttcaatacactctgggaaccgtttaccaacatgccgagcaccagttcattacgagtcaataccttttcataggtatcaatgctcgcatccagtttttccagatagtctctctcctgattgtaggattttatctcctgaatggtatcgagtccttcctggatatgctcggtcaccatccgcttgttcagataattactttcattgcttttctgtatttccttcttcgagaaaagaaggattgcggcagcaagcggcactacccagaacaaagcaatcgtcaactgccagttataaaatgccatgccgacggtaataagcagaatactgataatggaagcaaacaactgaggaaccgcatgcgagaaagtatgctcgagatcagtgcagtcatccataatcgtggcggtgaggtcggaaagattcttttcgccaaagaaagccagaggcaacttgcgaagtttttccgccaatgagatacgccggtttgcactctcatcataaacggtggtataggtactacgatattgcaataccgcaaatatatacatgactatcataaagacaataccgagtatgctataatagagaataccatgcgtcaccgaagccgaaggctgaaacacaggacgaagatattcctcaagaaagagaaaaacaaataccgccggcaacatcaatacaatatcgagcagtgtagtgaaaaacacacctttacagaaatctttcgctcctttagttgaaagggcaaaacgtctttttattacttcaatcattagaaacctcctttcctattgtccagcgaacagattgctggtattcattccacatatgataatagatgccttgttttccaagcaggttggcatgtgtaccttgttccgcaatcttccccttgtcaatgacgaggatattgtcggcatcagtgatgcttgaaagacgatgagcaatcatcaatacggtttttccttttgtcagttctttcaaggcttgctggatgagatgctcattttcggggtcggcaaaagcagtcgcctcatccagtacaatgatgggagcatttttcaggattgcacgtgccagtacgatccgttgctgttccccgccggagagatatgttccctccgtaccaatcttcgtattcagtccgagcggaagtttattgataatttcccggcattgtgccatatctactgcccgttccacttcctccattgtcgcgtcgggattaccatatttgatattttcgagcagagaagtcttgaacagctttgtattctggaacacgaaagaaatatatttcatcagttcttcgggagcgatttctcttacattgatgccacctattaaaactttcccttccgttgcctcccagaaacggggaactagacgggcaatcgttgttttccctccgcccgaagctccgacaagagctactgtgtttccttgcggaatagtgaaactaacatcatccaccgccttttgattagctcccggatagctgaaggaaactttttcgaactgaatactgaattcctttaccggttgtggatgctctacaacagtcaggtactcataagcaaccagattctcaagacgtccgatagcttcactcgcctgccccaaagcctgattgagatacatactcttcatgatactttgggagaatacaggagtaatgagaacaaacaggaagaaattaagtaataccgatgcataattacctgaataaccaatcagcaaaatagccaacggagcaaggaaaaacacaaaaccattgattattacggtatagagcgacatcggcttctcccacattcgtgtatagccgaataccattttattataattcatgatacagcggtgaaagtttttgaaagagtaaatagtctgctggaaaaccttcactacgggaattcctctcacatactctacagcttcggtattcatttcctccagagaggtcatgtagcttttcataaactgccgtccctccgcattcatcataaaacccataaccagcatggcaataattacagggacgatacatgccagaccgagtatccaatcgaacacaaaaatcagtatggcagctaccaacggcactagaaaagtagccgcaaggtcgggcaactgatgtgccagaaaactatgggtaacccctgcattgtcatctataatcttgcgaatacgtccgctcgtattaatgtcaaagaagccgagaggcatacgcactatctggcgcatggcttctttacgcaaattcgattcaacccgaaaagctgcaagatgcgaagacatcaatgcggcaaaataaaggacgatgctcgccacggccatgcctgccgcccaccaagcatacgtcaccacattaccggaagaggttatctctccgtgttcaagcagttctctcacaatcagccaaataaggatataaggcaacatgcccgccagggcacttagggcagacagcagcattgccgcaggcaaaagcactttccgtttacccatgtagttctgaagttttttcaatgtactcataacgtacgttcaatctatattaagttcgacaatcatttaacttatcgcttgttttcaaaaaagaacaatattcgaaatcgttcaaaaaaagagagcttatatttctataagctctcttcatcccattcaatccggtgcatgtgcacctttgatatatgattaatctcgactcgtctctcactgattcgcataagttttcaaatattttctgcaaaggtacagctcgccggcaagacggacaatacctaaaaataatgaaatttgctattcatgtttcagccatgcacttggcaatacttctttttcacctttttcattcaccagttccatctgcaatacgcctccgttacaatcgaagtaacgtacctctatcggatgaagcccggctttcaaagccttctgcacaataatctctaccggcgaatgtgctccatcattatctcccaacaattcaccgtcaagcattaatgtgctaccgtcgtccgagagaagggcaaatgtatagataccatcggcaggaacttccagatagccggtcaataccagaccgatatttcctttcacctcttcgggaatggataccgattccaccacatactcccctttgacaggagctgcatcaatatccgcacaaagattaccacggaaatcgtgccatactgctttcaagccgggctgcaaagcagccggagcagtcaccgcctccgcataaggagcctttacatacttggtacgcaccacatccgaaggagaaccatccggacgaaaagtgcggaaagcgaaatccgtagtcttcccaacttccaaagcaccgttataaagagctgattctttggtaggcatactgccgtctgtcgtataacgtatttcagtaccgggtaacgggcaggtcaattccacagttgtttcatcaataaatgcattcactttatagaatccctgcaaatcaggcaccctataatttaccctcatcacatccatccgcttaaattgcggaacaagctgacgataaaattcttcgagacccggtttagctgtcggctccgcccaagctatttcactcaacgctatcatacggggaacaatcaaatattcaatgcgcttcattgtcggaatccattcagcccagagattcgcctgcacaccccagatatatttcttctgttccggcgataaccgctcgtctgcacacggatcatacgcaagtattttctttactgaattctgatcctgcgcataatcgaaatagaaatattcattcggacaagcaatcactttctgcttttgtgcagttgccgtaggcaatgcatctttcgcccaacttctccaccaggtaatggcagcatcggaagataatccgtcggataccacttcatcccagcctatgagtttctttccgttggcaaggaagaatttctccatgtcacgtacaaaccatgcctgaagttcttctaccgaacccagtttctccgtacgaatccgtttctgacaaagaggacatttcttccagttggctttttccacttcatcaccacccatgtgcacatattcataagggaaaagttcaaaaacttctttgaacacattctggcagaactccagcgttgtatctttgcccggacagataggagaagagaaagtttccccccccacccgattaatccgtcgcacgccaattccggatattgaccgatagctgccaggaaatgtcccggcatatcgatctcgggaatgacatcgatacctctttgcgtagcataggctactatttcttttatatcatcatgagtgtaataacctccatacagcgtatctccttccacaatgcgtatcttatcttccggaatcagaaaatcggtattatcttcttctttcgcacgtgccatacaggtacgatcctgcgtattgaatttacgccaggcccctttttctgtaagcaacgggtatttctcgatctctatacgccaaccctgatcgtcggacagatgccagtggaacttattaagtttatacaaagacatcagatctaatacatgcttcacttcttttttattccagaaatggcgggaagcatccaacataaatccacgccattcaaaccgtggcgcatcttctatttgcacgacagggatagaataattctgtttctctccctgcacttctatcgttgcaggaagcaactggcgaatagtagtaatagcagaaataatacccgaatagtcagttgcctctacccgaatatactccggcgtagactcaagtttataagagccgggctttccaacagtatccttcaactgaaaatacacatctacctgactcttatcggtagtgacttcaacagaagacgatatgacattccgaagaatctcctgcagatacccgacagccggaaacaaggactgatcggaaaccccaatcttcattccatcttttaaaacaaacgagccagactgctcggtcagactaacgggggtaggtaagattgcaatctcttgcttgacggtaggcgtgcaagaagaaaaaatacaagctgacacaatgagaaaagagctacttagttttttgaacatgcggttaactatttaataaattaattgtcctgtttttaattgaccatctatatataatacaactaaaacgtataaactactaaaaaggcagaaaaagttttttgcgacttcatatcacagactcctattaatgtttatctttgctccccaatcccattacaaacaattataaagagtcacttcaatgtcaagagagaaaatactaatcacaacctcgtggatcagcacaattggcaatgcaatcttgtccgtatccaaaatcataatcggtttatttgccggtagtttagccgtagtcggcgacggtatcgactcggcaaccgacgtcgttatctctatcgttatgatttttacggcacgcctcatcaaccgccctccttcaaagaaatatgtattcggatatgagaaagcggaagggatcgcaacaaagattctatcactcgtgatattttatgccggtgtacaaatgttgctatcatccactaaaaacatcttttcagatgaagtgaaagagataccatcggctatcgccatctatgtcactatattttctattatcggtaaactcttactggcttcataccagtacaaacagggaaagaagatcaacagttccatgctcacggcaaacgctatcaatatgcgtaatgatgttgtcatttcaaccagtgttttgttaggattgatatttacttttatcttcaaattgccgatactcgattcgataacaggattgataatcagtctctttatcatcaaatcttccatcagcatcttcattgattccaatgtggagctaatggacggggtgaaagatgtcaatgtatataataagatattcgaggctgtagagaaagtgcccggtgccagtaatccgcatcgcgtccggtcacgaatgatagggaatctctatatgattacccttgatatagaagtgaatccacaaatcacgatcacgcaagcccatgagattgccgatgcagtggagaagagcatcattaattcggtagataatgtatatgacattctggtacatgtggaacctgccggtaaatgtcagacaggagaaaaattcggggtcgataaagatatggtttgatccatctctacacagagtttctttcactttcctctatcacctatcaccgacacttccaaaagctcttattcatggggatttcaggggtggtgacaggttgtttgcaacctatcaccgcatctatcacctatcaccgcccgatcaatcaatgattaacaaggagaaaagaacaggtctctatacgacatattagtttcagccgcttgaaacttttagtttcaaggcttggaacaaagtgtttcccggtgtgaaacaaatcgtttcactatttgaaacaaagtgtttcaacgcaggaaacaaaaagtaccgtgccgggaaactatttttatgaccgattaatagctgatctttactccggcaaagaaacttctcggcaaagaaggaccgtaaatataaccggaatcccggttagctcctctgtcaaagtccttctgataagactcaaaaatattctgaactccgccgtttaattgcaaatcaaccgttttgtataacttgaagtcataagccagtttcactcccaaatcaaagaaacgaggtgttctgattgcttccgcttttctttcaggcatttcacccagttcggcattctcggcggtgatatccatacgttgcaccaacatcctgccggtataggttcctgacaaagcaatagataaaggtttgacgggggtacaagtggcagtgaaataaccgtatgtatcgggagtacggaaaatcttcttttctgccggtgcatcgtcatgccacttatgcggttcatcgtaccggctacgttgtaaagttaatcccgcttgtatttgcaggatagaaagataagccactttaccttccagtgtcaatcccatcactttagcaccggggccattgctacgtgttttcactaatataccatcaccacggtcgtaaggtttgcccaatacaaaaacatcggtcagtcttgtataaaaaccctcaatcaacaaattcgtctggaatgctccgaaacgatgatacatatctgcagaaacactgaaactttgggatttctcttctttcaaatcctttgcacgctcgatcatagccaccgttccgcccacattttcaatatgcatatcctcatcaaaagcctgcggagcacgaaatccggaagaatagcttaaacgcaggttaatattctgggtaggattaaaacgcaagttggcacggggactaaagatcacattatccaccatattatgcttatccagacgaccaccaatcagaatcccccaacggtcgttcttccattcgttctgcagaaaagcactgtaaatattcaccgtctgatccgtgtgacggttatatccccacatgttatcttttaggcggtcacggttatattcaagccctgccgtgagatcagaaggcataaaaaagcacttgtcaaacgtatgtacgtattgtgcaccacccatagcggttaaatctgtcgtctttccataggctttcagaggatcgttacccggtccgtaataactgtcccggtctgtattggcagccgatgcaaaaacacttagacggttcttttcatccggagagaaataatcgaatttcaaacttccaccatcaatagaatgttgcaactgctccgcaatatgcgcttcgtgaggaggacggttcaacatatcccctccacgacgaaattcctgcatgtggtgatattcaaaggtcagtttggaataagtacttgttttgagataagagcggaaacccactgtctgattcttcaatttgggcagttcggtaaatccgtctccgtcataatcatatcccgaccgataacggttctgaccaaagatatacaatccggcacgatgatcgtccgtcaccaatgaaacattcagcgaggtgttgttatcgaatgaggagcttcctcctaaagaagttatggtgtgcgacagctgaccggaattgcgcaaaggttctttggtgattatattaatggttcctgcaatagccgaagagccgaacaaggcggagcctcccccacgcatcacttctacacgttcaatcatgctggcaggaatctgttccagtccatacactccggaaagggcactgaatacgggacgcgaatctatcagaatttgcgtatatggtccgtccagaccattgatacggacttgctggaagccacaattctggcaatttgtctccacacgcactccgggctggaagttcaatccttgtgataaagtggaagagttagtggtttcaaagagtttcaggtcgacgacattcaccaaagtaggagccatacgacgtgtcgtttcactccgattggcggaaactactactccgtcgagagcaatcgcatcctcttctatttcaaaatcttcttccagtgtctttccttttttcagagttacgttgcgggtcactgtcttgtaacctaccgaactaacttccagtataaaatttccttccggcaaattcttcaaaaaataatgtccggtagcatcagtcacggttcctatggtcgttcctttcagtgcaatggtgatgtatggaagatgttctttcgtttttttatccagtacatgacctattatattcgcatcggatttcttcagttcagggtagtccggacgttcagccaatgcgtatgacaagacacagcacaggccgaccaggactaaaagatatttcttcattgtcgttagtgttttaatgttttaattcgaaaaataataataaagggaaagggaagcagcgatcgttaatcgttgatcctaatacataaatactgttccccccaaaagataaactaagcgacaggaggtgctctaagagatattacgcccggacaagaacggtgaaaatgctctatttgcgggcggacaaacaggatgcataatagagataaagcagcaacagagaatgttggtatcaaaccgctgtcggtcaccaacacatgactcaagagatgaattagttggaattcaaccgttgtatggctatgttcgctgccttttttaaatggatgtgaatggacaattgtaaccccgttgaccacatgggagtgagtaaacaaagtgattcctgccatgtacgagataaacagtacaggcagaaaccacttcattatatgtaggtacaattgtttcattcggtcatcttgcacatttattctgtgcacctaagtcaaggtttagtttgttttttgcaaagataaggattgtctccatgcaaaacaatccctatttatgacgattttaaatcttaatcgaattttaataacttatcttcactccggcaaagaaacttctcggcaatgacggaccatagatataaccggagtcacggtcagcccctttgtcgaagtcgttctggtaggcattgaaaatattctgtacgccggcattcacctgcaagttcatcgacttgtaaagtttgaaatcataggcagccttcaaaccgatatcgaagaagtccttcgtattcaccgttatcggtttttcaaggaatcccggaactggttcgtggggaaccagcatcgaaccggtatatgtaccggaaagagcgatagataatggttttatcggggtataggttgctgtaaaataaccgtaagtattcggtgtacgcatcattttctttacagccggagcttctttgttccatacgtgcggttcgctgtaatggctctgctgcaaagtgattcctgcctgaagctggaatttagtcagatatgccatctttccttccaaagtcagtcccatcacacgggctcccggtgcattgtaacgtgtacgtgttaggattccatccactatctctccgtcggtaagggcaaatacatctgataattttgtataaaatccttctaccaagaagttaacctgaaacgcaccaaaacgatgataaatatctgccgagacactcaagctctgtgatctttcttctttcagattatcggccagttcaaccatcgccacattaccgcccacattctccacatgcaaatcttcgtcgaaagcctgcggagcacggaaaccggatgagtaactgaaacgaagattgatgttttctgtcgggttataccgcagattggcacgcggactgaatatcacatggtcaatcaggttatgtttatccaaacgaccgccaatcagaaatccccaatgctcattcttccattcattctgaaagaaagcactaccgatattcactttctggtctactgtacggtggtatccccacatattgtcttccagtttatcctgattgaattctattccggcagtcaggtcagcaggcatgaagatacattttccgaaactatagacatattgcgatcctgccatccagtttaagtcggtggtgtttccgtaggcattcggatcttggccgccaccataatagctgtcacgattgatatgctgcgctgatgcaaacacattgaaacgatgtttctcgttaggtgagaaatagtcaaatttcagtcctccaccattgatcgagtgttcggtctgttccgccacattcgcttcgtgaggcggacggttcaacaagtctcctcccctacggaattcttccatgtggtgatattcaaaagttagtttcgaatatgtcgttgttttcaggaatgaacggaaaccgatggtctggccgtgtatcttggggatttcagaatatccgtcaccatcatggtcatacgcagaacgatggcgattctgaccgaagatatacaaaccggcacgctggtcgtccgtcacaagtgatgcattcagcgccgtactgttatcaaaagcatcgccatcaccaatacctgtaatggtatgcgataacataccggaattgcgcatcggttctttggtaatgatattgattgttccggcaatagcagacgaaccgaacaaagccgatccgcctccacgcatcacttccacacgttctatcatgctggcaggaatctgctcgatgccatacacaccggaaagtgcactaaaaatgggacgggaatcgagcaggatttgcgtataaggaccatccagtccattaatacgtacttgctggaagccgcaattctgacaattagactctacacggacacccggctgaaagctcaatccttgtgccaaagtcgtagaattggtattctcaaagattttcagatccaccacattcaccagtgtcggagccaggcgacgggtagtctcgttacgattggcagatactactacgccatccaaagcaactgcatcttcttctatctcgaaatcttcttccaatgtgcgccctttcttcagcgtcacattccgtctgacggttttataccccaccgaactaacttcgagcacaaaattgccttcgggaagattcttcaagaaataatgcccagtagcatcggttaccgttccgatagtcgtacctttcaaggcgactgttatatagggcaagtgttctttagtgtttttatcaagaatatggccaacgatattggcgtctgacttacgtaactcaggatgattaggatattcatgagcttgtccttcaagggcaggcaacaatgcgcagcacaggcagacaaacgaaaagatgtatttcttcattttttcgtttgttattagttttcgataagtattcacatggatagacagataatgccctacctcatgcaaggtacggtatcatcattcaaagaatggagaaacgaataaccggaggtgctctaagtcccactaccccatgatacggacagtgatagtgagcatacggcgaacggccgagcaacaaatacaataagaaaggaataaaaagggaaagagcaaaaactacggctgcaccgtctgccgttaaatgagacagaaaatgaatcagtagcagttctactgtagagtgtttatgtgccgcccctttcttaaatgggtgtgaatggacgattgtcacgccattgaccacatgcacgtgggcaaagaatgtgaagcttaccagatacgacacaaacagtatcggtaagaagtagcgtgtaatattcaataacaatcgtttcacctcattttttctttgaggcggcaaagatacgaactatttatttaacaatcaatgattatacaaaattctgttaatatactgccgaagctatgatttgaataaacagaatcagaaataccatggcaatcggataaacagttgcgtaagctacgctcggtatgttactgtccaccattgaatcggcagctgcaagtcccggagtactcgtcatacctcccgttatcgttcccagcaaatcgagcagactgattttaaataccagacgtccgacaatagctgctacaagcatcggtatcaatgtgatggcagctcctactccgaacatcagcaatccgctttcctggaaagtggctaccagattcttaccggcagaagttcctacttcggctagaaaaagaagcagacctaactggcgcaacaactgattggcaggtccggacatagaccagatgatggggcctgtcttaccaatcgcactcaacacaagggctaccatcagcactccgccggtcagtcccggagagaatgacagactatcagagaaagatatatttattttgccgaacagcactcccagtacaatacccatcgcaatggggaagaaatccgtatcagacagtttcttcgcattgttacccagcaggcgggctactcctttaagtccttctttctcaccgacaaccatcaatttatcaccaaacttcaaagcgagatctggagatggagacaaatcaataccgcttcgacggacacgagtcactgtacaaccaaaatttttctgtaagttcaaatcacccagttgtttatttatcatgtcctttttggtcaacagtaaagattctatttcctgcgttttatccaaaggcagttcgccttcttctctcttaccgattaacacagcaagctgattcaatgattcttcgctacctacggcttgtatgtagtctccttcacgcagcactgtatgggctgtaggaatagatatttcatcattgtgcttcagacgggaaataacagcgcccgtcataccgcgtgcattaatttgcatcaggttacggttgaacacatgcgaattggtgacacggtagatacaagtagtcagttctggaaattgtccgcgacgttctatctccaggcgacgggcttctttatccaaatctacccgcataattttaggtaacagtttgacaaacagaatcacgccgattactccaaacggatatgcgataccgtaagcaatggatgccaaaggagaattggtactgtcaatagcaaccgccagacccggcgtactggtcaacgcaccggcaatcagaccgacaatactcggtgtatcaatatcaaatgcgtacttcaacccgactgcggtcaggcaggcggaacaaattataagcatagtaatgagaataagcgtctttcctttactgcggaaagaatcgaagaatccgggccctgcctgaataccgatggtaaaaatgaagagcaccaaaccgaagtttcctaattctttaggaatgataacaccaaaatgcccgaaaagaagggcaatgaaaataactgccgacacatcgagagataatcctctgatttttattcttcccagcataaaccctaatgcgacaatcaggaaaagggaaaaataagaggaatgcaataagtcagtaaacataaaaataaaggttagttagtttaagggcgcgaaggtacggattttatttaatcctcacaacattcgttgctgcaagtagctctttcgtcttcaaactccaaagtggcatgatgaatgcctgcctcttcgagtgcttcctttatatgatgtttcacttcctccaactgtgtgatattatcaatgacaacgtgggcagtcagagcggtttccgttgtgcttaacgcccaaatatgcaagtgatggcaattctccacaccgggttgttccacgataagttgctgtatcttttgagcgtctatccccactggtactccatccaaagacaaccggagactgtcatgaagcaatccccaggtagagactataataataacagcaatgccaagtccgataatcgggtcaatgatgctccatcctgtatacgtaataataataccggaagcaactacaccgacagataccagtgtatctgctgccatgtgcaagtaggctcccttcacattcagatccttatctttatctttcatgaaaagccatgcagtaagcgcattgatgaccactcccaccccagctgtccatgcgatagcagaaccatcaaccgaaaccggatgaaataatttgtctatgctctcggcaataataatgccaacagcaaccaacagtataactgcatttaataaagaaacaagtatcgtgctcttcttatatccatacgtgtaacgactattagggtgaactttctccaaccggaaggccaacatggcaagtaccagactggctacatcacccaaattatgcccggcatcggaaagtaaccccaaagaattataataaaatcctactccgaattctactatgacaaaagttatattcagagcgatgcctatgataaaagctttattgagcgatgtcaaccgatgactatgttcgtggtgatgatgaggttccatattatatattgttattatatctaatatacaaagaactcgcaaaaaaacggcaaaatttggataaataaagtaagtgtttggtattgaggagagttaagccaaattcttctatacctttccaaatcgctaaaatgcaggataatgaaaggttaagagaaagatttgctacttatccgttgccttttttagccccggataatccggcaaaataacgcttgaccacctgcggttttaccgttcaccatgcaaagaaccctatattttgctcgtaaagataaccgtttttttccgtttttcatggaaatacaggttatgttaccggcatccggggttttattctttgttccgctataattttcataactgtaaataactctatatcaagtaattttgcaacataaaaaaatagagttatgaaacagacggatgtaacggttacgttctacctcaaaaagagcgaaatgaatgacgagggacattgcccggtcatggcgaaacttgttgtcggcaaattttcagaagcggcttttagcgcgaaaatgtccgtacccgctgcactgtgggcatccggacgtgccacgggtaaaagtaacgccgcgcgggaaatcaaccggcaactggacgatttgcgagcttcagccatttccatttatgccgaactgtcagccacccgtgagaatgtaacggctgaagaaataaggaatctgttgttggggacagctttcgggcaggaaaccctgttgggttatttccggacgttcatcgaacatttcgaaaaacgtgtcggcgtgaaccgggaaaagggaacagcgcaatcttaccgctatgcttgtaactgtgtggccgctttcatccaggagaaatacaagttgtcggatgttcctttcacggccctgaaccgttcattcatcgacaactatgacctctacctacgcacggagcgccgctttgccctgggaactatcgtgttgcttgtcacacggttgaacacgattgtcggggaagccatcgcggaagggattatcactgccgacccgttcgcgggttatgaagccgaacatcccgagcgggaacagaaataccttaccgccgtggagttacaacggctgatgaccacacccctgcacgacccgaaactctaccatatccgcgacctgttcctcttctcctgctacacgggtatcccttacggggacatgtgccgcctgacgacggaggatctggaagtggccgaggacggtgaggtatggatcaagaccgcccgcaagaagacgaaaatcgactatgaagtgccgttgctcgacatcccgttgctcatcctcgacaagtaccgggatatggccccggaaggaaaactgctgccgatgtacagcaacaacgaactcaaccggacgctgaaacgtattgccgccatttgcggaattgaacggaagctcgtctttcactgcggacgccatacctacgccaccgagatcacgctttcgcatggtgtcccgcttgaaaccgtcagtaaaatgctggggcatagccgcatttccacgacgcagatttacgccaaagtgaccgatgacaagatcgacatggatacccggtctttagaggaaaagattgccggtcgcttctccgtagctatttaatctatcattgacaatcaaattcacaacgattatggaaccgaataataaagagataaaacgtcgcagcacgttctccctgctgttctacatcaaccgcacgaaagtccgcaaggacggaacatgtaaattgttatgcaaggtaagcatcgatgccaagtcggccccgatcaatatcaacgcgtttgtcgatccatcgctctggaatccggaaaccaaaagggcgaacggacgaagcgagaacgcccgaacggtaaacctggcaatagagaaactgaccgaaaaaatcaccggacattaccgccatattcgtaaaagcctcggtttcgtgacggccgagctggtcaaaaacgccgtggaaggaatcgggcagaaaccgttcaccctccttgccttgttccgcgagcataacgaggagttccgcaagcgtgtcggcgtggatcgcaaggaagaaacctatgaaagttacgagaactcctataatattttagcctccttcgtgaaaaaaaggaaggaaaaggaggatgtagcgttgcggagccttgaccgggagttctacgatgattttgaaatattcctgcgtacagatcgtgaaatgaaacccaagacagtacacgagcatctttaccggttgaagaaaatgaccaagcgggctgtcagtcagggtacactccggcgcgacccttacgggaagctgcacccggaactgccccagcgcaagagccgccatttgaaactcgaagacctcaaaaaactgatggaaactcccgtcgataaacccaacctccagcgggtgcgggactggtttctcttcgctaccttcacggggttgtcctacgccgacctgaaacgcttgtccgaaaaagacatcacgcagtcggacgacggaacgtactggatacacatccggcgccagaagaccgaaacgccctcggccatccgcctgctgaacgtgccgttgcagatcatcgagaaataccgccacgagcgtaaaagcgacaggattttcaacctctattgccgggggtatctcatcaagctcaccagagaactgggacggacatacggcttcgacatgacctttcacaaggcgaggcacaatttcgggacacatatcacgctctcgttgggtgtgcctatcgaaactgtcagccgcatgatgggacacaagagcatttccaccacgcagatttacgccaaagtgaccgaccgcaaggtggacgaggacatgaaacgtctgaaagaacagaccaaaggccggaaaataaatctctacgaggaggacgaaccggaaacggcagatattataacggtaaacggttgaacagtataacaaaaattgataaatttgtatgactatgacgacaagagaacctatcagcattgaaaacgggcgggtggaaatccacacgccggagaaccgtgtatggctcacgcgccaccagattgccgacctgttcggagtcttcgttcctgccgtggggagcaacatccgctccatactcaaaagcggcatactccgtgaggagcgggtttaccgccgggagcgcaaccgtgacggcggtattgtcgagctgtattcgctcgaaatgatcgccgcgctggctttccgcttaaaatccgggaatgcagaagccttccgacggtggcttgtccgaagggccacgacgaccgctgtcgtctggcagctccccggcatgaacacgatattgaattgaaaaagaagaacggccaacgttttggccgttcttcttttatacccattcctgtcccccgatacatttcttccgggaatcttccaggagtttctgtatctcggattccatgtatagtaccttgccctgaatcaaataatagggaatgattcgcgccgtgcggtattcctgcaatgtacgcctgctgattttcagcagccgggacaattcctcgtcggtgacgaaccgctctcccttgagtgtccggcctccggaggattccagtttatccagtgccttgccggccttttccaaacgccggaagagatccgccacacgcggatcgtgcttgtcgatgaaataatggctcataacgcggcggtattaggatagtgcgacgattgcagcagcttcccgacatcttccggtttgtagaagattttgtgacggatgcggctgaaaggcagcaaccctttctcccggtaggtttgcagggtacgtttcgatatacccagcacgtcacagacatcctggttgtccagccattttttcaaactcacgtcctcttgcctgcggcataacgcctcggcttttctttcaatggcttccacgtgccctgccagcgcgtcgaaagccttcacgtccatacttattatttccatgttctgtttcattttttgtttcccggatgcccaaaagtacacaaatgaacagtatcttgttatcagccagtggcatatggacgtatccgtcttaaaagtggcagcgagtggcgccacgtccggcggaaacgatcctccgccgatacgggatcggcacgctccgatacgccaatcgcccgtgaaaggaaatgttcgcgggcgatttatcattccatgcagggtgagccgtgaaccgactttctcgagcgttcacggcatatcgttttctccccgtttctctcccataaccttttcctctctttttttcatgccgcggagcgcggtatggaaatctgttgtcagtagcaaaggtagttacggggctcacgctgctgcaagatcgggccgcggggcggtttgccgcaaaatcttcctctttccctgcgggcgagcgtattttccgacaaaatcttgcagcagctatccccgacaccttttgatgctaccgaaacagattccatccataccggctccgctacggcataaaaaaaaagtcaaaggttatgagaaacgaagagaaaaataaatggaaacagaaatcctccaaccttccacttggcataaaggcaaaggtcgggttggcggtaaaggtcggggcggtggctttgggcttccacgtgtggggtatcgactttatttgggtcgttttgggcttcacgttctgttatgacatcctgcggggcattttctcctgccttgtttctctcgtggctctaatcggctttttctatttcctattcactcacatcttctaaattattacaggtatgacaaagtacatttcattattcggagcgactaccacggacacgcaggtgcaggtagtcaaggaaaaccaggttatcatcggtatcggtgcgggtgcgagcagaaagcgttacgtcgtttacaaggtggaacacaccgcccgtggctacgtgtaccacatggtcgataccgaaacaaaggaaatcagccaaacggacattctgcgacccctctcgcaaacattcggtatcggcaggtactacgacgacgtgaaccccgagttcatggacgctttcgaggtggctttgcttgtggggcaggcggaagagcaagccacggcgcaggccatcgccgccgccaaagagaaagccgagcatgaccgcatagcggaaataggggcgcagaggttacgccgcatcatgcccgaaggggtgcagggcgtaatcatcgccgaactcaacgaaacggaatacactgacccctcttacgagtgttcgaccacccgaagcgtgcgtaccgtcattctcggcttttcggccacctcccgcaacggcttcggggagttgagaaaggcggcggccaatttcccgcaaacggcgcacctctccgaatacgaccccaagaacgaacaccgctatcccgttttcacgctcggcaaaagtccgaaatacgggtggagtgtctgcaaactggcccactacacccgtgaagggtacattgacaggctggcatatatcgcaggaaacgaggagaatatatgtctgcccgagccgaaagacgaaaaacgggcggaacgcactgaaacgagcgtgcaaggcgggtttatcatcgtggactattccgagaaggcgatagccgtattcggggacaccaagcccgtcaaggacgcccttcacgcactcgggggacgcttcaacgcacggctgacgcatgacgggcagaagagagcgggatggattttccaaaagaccaaagaggacgaggtgcgacggcttctcggaaaggacgaataaatgttgaacacggggcggctcgccgccccacaataccaaaaaatcatggcacaaggaacagattatttcaaactgacgatacagaactatctcgacgcacgggcacgggaggacgaacttttcgcaccccgatacgccaacccgaaaaagaacattgacgattgctgcactttcatcatcaaccaagtacggcagagcggttgcaacgggtttgccgacgaggaaatatactctatggcactccactattacgacgaggaggacatcgacatcggcaaacccgtcagttgcaaggtagtggtcaatcacaccgtcgaactgaccgaggaggaaaaagccgaggcacggcggaacgccatacggaaggccgagagcgaagcctacgccaagttggcgaaagccaagtccaaacccaagaaaatcgaagataacaaactaatgcccagtctattttagttatgaaaccgagaacaaaattccaacagagcgtcgtggcggcaagcaaacacctgccgccgcttacccccgcacaaatcgaatgggggtacaagaactgcatcgagcatatcggacgccgcacgccgaaaggacttatcacctgcaccgagtgcggccacacgtggcagagcgaaaacggagaactcacggacaatctgttagggtgcgagtgtccgcactgccacaccacgctgaaagtggaaaccaccctgcgccgcaagttcaacgattacgagtatttgtgtatcgtaacccgctgcaagggttttcaagtcctgcgcttcgtctatatcgagtgttgggcgaaagtgggacagacgcccgtttacacccatatcgaagccgtacagcggtggattgcccccgacggacgctccgcaaccttcgcacggctgcgcccgatgggcttcttcgttcacgggtggagttggtcgagcgcattggaactgcgggcggagaacgacgggaaatacaacatcacgcccacacgcatctatccccggcaacggcttatccccgaactgcgccgaagcggttacggcaaacaactccccgatgtaacccctttcgaccttatccacctgctgctctcggagaacaaggccgaaacgctgcttaaagcgggacaaacggcactcgtgcgatttttcgcccgttcctcccgcaatatcgcagactattggccggccatccgtatcgccatccgtaacgggtacgctatcgggaaaccgacggaatggtgcgactacatcgacctgctgcgatttttcgggaaagacctgcataacgcccatttcgtgtgtcccgcagacctgcccgcagcgcatgacctctacatggcaaaaaaacggcggcacatgcaaatggaacggcggcaggaggaacggcgcaaggcgttggaacaggaagcctcgtttgtcgaagccaaagggcggtttttcggagtggagttttccgacggggaaatctgcatcaaggtattggacagcgttgaagccatacggcaggagggcgaggccatgcaccattgcgtgtttaccaacgaatactatctgaaagccgactcgctcatactctcggccacaatcgacggcaaacgtatcgaaacgatagaggtgtccctaaaacgcatggaggtcgtgcagagccgtggcgtgtgtaacaagaataccccataccacgggcaaatactgaaactgatgaaggggaacatgtcccttatacggaaacgaatgacagcataaaaatcggggcggcgaaagccgcccgcaaaaacaaaatagaatgaaccaaatagcatataaattcgtgtcgtgggacgttcccgcactcgaaagccttgcaggctcaaaagcgtacatattacgcaaacggctcaatgacgggggaacgctcacccgtgaggagaaagactggattacccgtgaggtaaaccataacacctatttcaaggactccattccgcttttagggtatcgtttcaactttgtcgatgtactgaaaacattcgtggtaaagcagtacgggcattacacggaatacaagggcgtggacaagacgagcatacgctccatgttgtacggcagagtggaaaggattgtcgaattataaaatcggggcggcgaaagccgccctacaaaaaaaaatataacaatgaaaatcatctataaaagctacatggcacgcccgctcaaacccttcggggagtgggattgggaagttcgggaagcagtcaagacggcccttgcgctcgtcgaggggaaaaacgggttcaaaacccattccgagatatggcgaaggtgcaacctcgtcattaccgtgggacacaacatctacaccacgagtatcgagatacgaccacccgagcaggacgtgatacgccgcaggagcaactggcataacggctacgcctactactgcaacggcgtgttctgggcgaacatgagcagggttagagtggaacttgtctgattaaaaaatttcggggcggcaaaagccgcccgtaaaaagcgagaatatgaaaacgaatgaagtaaacaaggaaatctcctatgaaacgctgctcgtaaccttcggcgagggtatcgggcggctcaacaccatgttcgacgacccgcaggtgtggggcgttgccacgctgaagcagtggatcgacgggtatgaaactacgcgcttcaccgaaatcgacgaccgaacggcggttatcacatccgaatacaacatggacagcgtgaaggaatggctgcaaaagaacacaccgattatcaacctggaaaaacgataaaatcatgcgcaagtacaaattattcatcggctaccggctgctgggagagttttccggtatatgggaagccaaaaatttcgccgctgaaagcggcatgagcggaattttctcgctcgtgggagaaaattaccgggacagttggtacgaaccaaaaaaacaggacaagaatggaaacaaagattaaagacatcacgggagcggaaataaccgttaccgacttaaaagaggcggtacgccaatgccgggagtgcctcgcaagtccctacctgatgccctcggggcataccgtgggggaaaaccatgcctacatgttgcggcaactgctcgccctgcaaaggcggaaacgggaacacggcaggcaacggccgtgaaaatacgacgcgaaaaaaatcggacgataacaaccgtccgatttttttgtttcccgtcaatcgaccgccgtatggtcgcccagcttcccgtgcagttcacgcccgatatgtccggcaatgccacggggagaaatttcagagattgaaccccacccgccatgcgtgtatatgcacgtcttgagcggttcggtacgggaaaggtagaacagatagccgttgcggagcaggatgcccacaaacaccgagccgacctcgatgtcggcgatctcgtcaaaacgtatcttcccgtcattgtataatactgccgtgccatccgcatcgggaatgacgaacagatcgtcttccatgacaatcccgtgcaactcgattagcgaccccaggcattcactcgccgatacccggtcgtaatcaccctttacctcatttgtcgatttcgtttccatatcgcttttctttaggttcagacaaataccatacgaaaaaggcgtgagaatacgttaaataccggcattgaggtacagccaagcacccatccactcgatagataatttctccccacgccgctatcgcatacgcttgacgcatatagacacgacgatgaagaagagaactacccattattttgcgagcggattaaaatttggctgttttcaatgccccaccataatgtgttccttccgtatgtaaatcgcccggcggcacgccgccggaggattcgattgcaaatataacgatttcatccgggtatcggcgacaacacgtgcgatttttaacaaccttcctgccaaagaactacccgccgtcctacaatttcggcccccgggcgggtttgcggggcgcgaccttcggctgcgccttcttctccctgggcggttcgacgatccgcagtttgagtttctccgtcttacggtcgtaacgcacctcgcagcagtcaatctcacccgcaaccgacgtccacacgttgttcacacgcaccgcgccgcccgagtagagggtcttgtattgttcgtattcgagcggctgccgcaatttcgcgtccacctgacggtggaacgaatagatattacgtcccttcgctatctcgtcgggaacgtaaacccgcaactcgggatgggcggcctcggcatagaggcacagatccgccgtgcgaagctccctcggaacccactggatcatcctcgggtcgccccgcacggccgtatcggccacgagcggcgtgatggccgtgctgggaatgtcgtacagcacccccgcatccttgcgaacggcctccaacgccacctcctccgttacaagccggcggttcaggtgcaggatactcatcaaccggtgtatcttctgcgggtcgtcctgctcgcggaacacctgcaagaccagggcggggtcgctcaacgcgctgataaccgagaaatcggttttgtccttcccgtaggtacgctcgaaagcctcccggctcatctccggcgtcctggcttcgcgggggacgcctttcaggttttgcgggttctcccgcaccaggctcatgtatagatccgggcttttcatgctctcgggcaggtgggcgatggcatagggactgcgccgtatggcctccatgcacaactccggcgttttccacttctcggggacatattgcaggtagctcccgtcgtgcccgacggcccggcggcacatctcctcgttcttggcgtggtcgggaaggttgtagaacagctccggctccagggcgaagatctcccgggccaccctcggcgtgacgtgtgccgggttcatgtgctgcaaaaaatcgaaggtcttatcgtaattcgtgcaatagaaccccaacactttcaggtgtatctcctcgaaggggatatagcggaggacacgcaggtcgtcggtacgggccaacgcccggttgcagacctccggcgtgagctgttcggggttgaaaaagcggatggccaggggatcgcgctccagcgccatcccgcacagacggtcggttttcagatgtttcggaacgtactccagtgccaggtagttcgaggacacggcggcctcgcagacccgttccgtgcgtaattcctccggcacttcatggagcaggatgccgtccccgctgacggcacgcaggcagactgcctccgtgcgcagttccaccggcacgagcgaaaggcaggacgcgtccatccccacgccgtgaagggccagttccccggtcatgacctccggggcaatggaggcgaaaatctcgaacttgtccacgaacgacatcccgaattttttcagcccttccaggcatatatcgggatacggaatgtaagggagtatcttgtaatcggcactgtccaccgctttcaacgccgcacggcatatttgcggcgtcctcaattccccggggacggcctccagcaccagaccgttgcgcttcacggccgtcatgcacagttcgggggtcttcaacccctccggaacgtaatacagcgcgtagctgttgctatcgacggcggcacggcacattttcggtgtcttcagacggtcagggacgaatttcagtgtttcgccccggtggccggccgcggcaagacaaagttccggcgttttcatcgcttcgggaacgaactcgatgttgaaagccgatttcttgatggcgaaacggcagacttccgccgttttccgatcctcgggcagcgtctcgaaaaggttctcgcgccacgggttctcgtacacccccgtatcgagataggctatatctattctctcttgctctgtcatggttttcagtatttatggaaagcgcccgggtgacgggcgcttctcttggttagacatattacgttatcgttccgtttcctccgtcccgttctcgctctggaacgtgaaggaggtcttcacgacctgacccgtgttgtcctcgacatagacgtcgatggtctgctggtcatcgctgcgcgatgtgtaatagaggcggaacacctcacggtcgagcggatagcggtcgttgggcaggaacaccgtaccgtcgtccatcctcaactcaccgcgcccgtcgggctggaaatagcggatcgtgtaacgcgcgccgtcatatctcccctcccgcacgagcgtgcagcggatttcagcggtttcaccaacggagattcgcttctgaacgggcatcgtttccagagagaacgtgtacgcctgctgtatatccagcccgttgtcgcaggatgcgcataaaagacccagggcggcgatccagaccgccagggccaatatctttttcatctttttcatgtcgcttgcaagtttaatggattatgaatttcacgcccaggccgaactgcgcgtggaaatgtcccgttgtagtgccccataggatacgctcacgccccgtcagcgagaggataatcctgtcggtcaggtacgcatcgacctccagcgtgacggccccgccatagaggaaacggtcgcggtggcggagcgtagagccgtcatagagccgcctctcgccccggttcacgctctcgtaaccggccagcgccgagccgccgaggtagaagaaaaaagtcctggacgggtcggcgaggaacttgtaatagtaaccgccctcggccgtgaactgcgccacagggatacgttccgacttgtaggggtaataacggttcaggaactccgcgccgaacacccacttatcggcatttttcgcgtagcggctcatggccagcccgaaccagtagcccgtttcgctgcggctgtcccgggtatagaagccgtcggccatgcctccccgtatttccagcccgcgcatggcgggcagggcacgctgggcgtgcgccccgtccgaaaggaggaggcataaccccagcgtgagaatgaatatcgcccgtttcatatcactttacctttaactcgttgataacacgtgcgcgcaccaggtcggcattctccaccgtgaaagtctggtgtcgcccgccctgctgctcgtgcagttccacgaccagctgcttgtcgtcggccagcgtgaacttcgggagcgtgaagaccatgcgctcggtacgcttgccgccgatgacctgcacgttgttgtacgcacgcacgggccatacgacctgctcctggatggccgtgcgtttggccaccttcttgtccgtaatcttgaacgtcaggtagtccacgttgaaaggcacgttggaggagtttttcagttggaggtggaaataaagcaggtcgttatgcacgtagatacctttgaggaggtattgtaccccgaaacgcttgcaaccgatatgcttgatctcgcggcggtcattcttgtaaatggactgcatgatcagtttgaccagcagcggagattcgcatcccaactcctgcaaatagatgtccagcgcattattggggcggtttaccgcctccccgccatgcaggaagtccgccatctcgaccgacagtttcaccggctcgtcggcatacttgacattgaagctgtaataggccccgtcctcggtaatgaccgaaaggttgctctcgcgcgagaaatcacgcagggccgcctttacacgcagcacgttttccgtgccgtcggctttcgccgccagaagatccgaagaccccagatcgacgtaacggatggccgaggggaaaatcacatgaacggtcttgctgaacgtcacctccagcgcgtagggcgggataacccggttgaaggtcagcggacgggtaagaccgtcgtacaaatcgcccgtggagggcttttcctgcgcgtgggcagcgaacatgcacccgataaaagcgagtgccagaagaatctttttcatactcgataattttttgattgttgataaaaatggattttttcagtggtgtacggaagtacgtcgtttgtacccttattgaaggggcgggagcagcaggacgctgtaaccggccttgagcgtgaccttgaccgagcgcatcttcttgctcacgtattgcgacacgccctggatggcgctgcgccccaggtcggagagcagttgcgaaccggcatcgtccgtgatcgtgatactgctgcccatgcccgcacccatattggcggcgatctccttcacggcattgagttcttccgaccccggcacgggaataccctcgttgccgttcgtgtcatagaccgacagatcgaccggaacgaccgccccgccgtgctggacagcgctgaccttgaccgtcagccgttcgccgttgatcctcgccgcccccgttacgggcgtacccgaggggatgagcagctctcccgccatcatcggttccagcagccggaaagtaacctccccgccatcggtgagcgtcacggtttgctgcacggcggcacggatactgttgcgctcgggctcgcgaaggtcgctccccaccgtgttgaaaccccagttccggggcttgacgaactcacgggcgaagaccgaatcgggcagcggggcggcaagcagcgacacgatgttacggcgcacctggcgcacgggctgcacggaagccttgccggaaacggaggctttctgacgcggggcttcaggggcctgaccgccattcatgtagcgggcggcgatctcgtaggacttctccagcagcgccacctgctcctcctgggccggtttctgcgcctgctgttcttccaggcggcgttccagttcctcgatgcgggcctgcatctcgcgctcttcccccgtttcaccggcggtctcctcgtagaaactgcctaactggcggttgatgtcggcataggcggcacgggaagtccggaaagctcccgacgaaccgccggcagggccggaagacttatccggcacggcagcgggcatgacgggctcttcctcctcgtcctccatcccgaacgcgaaatcctgcaaggagcgcatcttttcccgctccctgcgccgcatctcctcctgcacgtaggcatcacgcttgtccgagaggataccctccgattccggggtcggcagctccgtgttgaaacccgccgaaggctcctcccgttctttttcgccgggggagaagatcagccacatgcacccggcaaaggccaggaaaaagagcgggaagaccaccatcttcttccgcatctgtatctgccggggcgtgagttcctttttccccgcctccggctgtttattctgtttttcgttcgtcgtcataattgaaatcttttagatgttttacactgtcggcctcctgccgttgtcttaattccagctccagccgctcgatatgccgtatctgcatccgttccccggctcccttgccgaagcggtagatggaagacacggtaaagtagagcgacaagacggaaaagaacaagagcagcgtgaggatcacgataatccgcttatcgggcgagagcgccccgcaagcgcggcgcaggtggtcttcgacccactccccgaaagcctttattctcttctttgccatagccttatctttttaatgtacgtaaatcgcggttctccagaatctcgaatttctccatgatgaaaccctgcgggttattgtccgaacgccccgagttgatcagctcgcagcgcgtgaccagcgaacgctcggtgatgttgctctcgcggacaatcatttgccgggcataggtcatggcccggtagggataggcgttgaagtcgcacaccacggagtccacctcgatacgctggctgatgttccccgacaccacacggttgtagtaacctttctcctgcatgtcctggtaataggcgaaggcgctcttatcgaccaggaacagcgcgcggttgatgttgctctcgatggccgcacggtcgggcgagagggtgaagaacaactcgtgaaaacgccggatatgttcgcgcgcctccacggggcggttctggctcaaatcctgcgagagcgccagcatcagcgacttgcccccgtccaggacgtagatcttctcgcgctgcttttcggcgaaacggaagctcgcgaccacgctgaacacggataccagcgcgcacaggcagaggaacacgataccgaaaagccgaatctgcctgaaacttgtttcgatgttttttaatgacttgaattccattgtccaaattgttatgaaagattattgttaccttgtgttgccaggttgcgcccgttgggggcactgcccgaagccgggccaccgccgccgttaccggaggaggaaccgccaccgccgcgacgcccgaacgtgcggccgatcatgttgccggcgataccgccagcgacacccgtggcgaatgccccggccttgttgataccgcccatagccccgccggctccgcccgactggatcacccactcggcaacggtggggatcgtgaaatagcctatgatacctataatcaaaaagataatatagacaccgctgccgctgtcgggaatgtagttggggtcttgcagggccaggacgtccgcctggagcatcaacgtctggatcttggccagcaccgcggagaacaggtcggcgatgggaagccaaaggtacacgctgatatagcgggaaatccagctcgcgagcgtcgagtggaagccgtcgtaaatggagagggcgaacgacaagggccccagaatcgacagcacgactaaaaagaatgtccgcagcgtgtcgatggtaagccccgcggcgttgaacaacaactcgaagaagtcccggacaagctgccggaaaccggccttgatgtcgtaccacgtgcgttcggcccacatgctgataatctcgcccaagtccgtgatacccatatccgcaagccgttgttcatacacctcgtcgtccactaaccaagccttgccctcgcgcctgcgggcctcggcttccaaatcgtccttctgttgctggtatgcctgcaaatccaatgtctgcccctccagtatggcgtgcgtgccctgcaccacgggcgacatcacggcgttgatcgtccccagaaccacggtgggaaagaacatcacgcacaagccgatggcgaaaggccgcaggagcgggaacacgtcgataggctccgcgctggccagtgccttccatacccggtaagccacgtaaaagagcgcacccaggccggcgatacctttcgccaccccgatcatgtcgccgcatagcggcatcatctcctgatacaggttccggagaacctggtgtaaattgtcgaaatccatgactgcctccgttttcaggttaccaatatctgtcgttcgggttcccgtaaagtgccagcacccggtgcgcgtcgcccttttcgcggctgcggatgaaggacacggagatggtcttgcgcgtgtaatagcgcgtgaggttgcggtactccagcatcttcgtgtaaacctgatccaccacgtccatccgctccttgtccgagagcgagaggccgttgccgccggttatgaccgtcttgagttccgccaccagcgcaccgccctcctccagcaatcgggcgtaacccgccgagatcgccgccagctcgtccaccgtgaagttcgggtctgaaaccatacggttgaatcccgaggtgtagatttccgtgatctcgctgaccatttcgagcgtcagcttcaccttccgggcatccttgatgatgttatgcaccgatttgagggcgtcgtagtaagccttgctctggttataaatcttgatactctcttgcagcgacttgaccatgttggtcgccgtggtcgagctttgaaccgcgctcttgatgttctgaacgaggttcgacgggtcgatgaccgtccactgcgcttttgcctggtacgtgaagcaaagaagccccacgaacagcgttaaaatcaatcgtttcatccttttcattatttaattcgtgaatacttgggcggtcattccgacgcccgataataatccccgtaggcggagagctggagcacctcgcgccccgcatcgtaggccagggcgacatacccgtagaggtcgaagtaacggatacctccccaatacttcctcacgggacgggagaagcgtgtcccgtccttgtaggacacctccacgtaaaaaccgccgccccggcgtcccgggttgcggtagatgcgaacccggggagaacccgagcggctttcccactcgcccgccacctcgtacagcgcgaagtccaaacgcgccgccgtggggtctgatccgatacacttgcgatacatggcctgccctccctttaacgtttgccctcggcgagctgcctgatcgccagttccatatcaccgcccagctccccggcaagccgctgtacctccactttctccgtttcctcggtcgtgtaggccaggtactccgggacgctgacctccgtggcatagaccgccgactgaacgccgcccagaccgatccagacctccttgtatttacgggaagggtcgttggactggttgatcgagagaatctgcgccttctccttgtcggtcagccccaacaaggactgaattgcgtcgaaacggttcatgaacttgcgctggtcgagcaggatcttgcagtccgagttgttgatgatcgcctccttgaccaccgggctggaaatgatgtcctcgacctcctgcgtcacaacgatggcctcaccgtagtatttgcggacggttttatacatataacgcagatattcagccatattggccgtagagagcgcc
